United States Patent Application Publication US 2022/0211063 A1 - sequence listing, part 19

SEQ ID NO: 55 - DNA, 8605616 bp, Penicillium roqueforti (residues 6,884,497-8,605,616 of 8,605,616)
  misc_feature (89143)..(89590): n is a, c, g, or t
  misc_feature (91422)..(91652): n is a, c, g, or t
  misc_feature (329890)..(330026): n is a, c, g, or t
  misc_feature (430777)..(431108): n is a, c, g, or t
  misc_feature (461660)..(461676): n is a, c, g, or t
  misc_feature (496393)..(496572): n is a, c, g, or t
  misc_feature (531997)..(532091): n is a, c, g, or t
  misc_feature (539747)..(539882): n is a, c, g, or t
  misc_feature (569530)..(569734): n is a, c, g, or t
  misc_feature (649047)..(649183): n is a, c, g, or t
  misc_feature (691108)..(691170): n is a, c, g, or t
  misc_feature (866493)..(866657): n is a, c, g, or t
  misc_feature (1032404)..(1091803): n is a, c, g, or t
  misc_feature (1092490)..(1092701): n is a, c, g, or t
  misc_feature (1210158)..(1210370): n is a, c, g, or t
  misc_feature (1240516)..(1246788): n is a, c, g, or t
  misc_feature (1247715)..(1253647): n is a, c, g, or t
  misc_feature (1258266)..(1372265): n is a, c, g, or t
  misc_feature (1374099)..(1374507): n is a, c, g, or t
  misc_feature (1457506)..(1457792): n is a, c, g, or t
  misc_feature (1505319)..(1505491): n is a, c, g, or t
  misc_feature (1513190)..(1513352): n is a, c, g, or t
  misc_feature (1624032)..(1624233): n is a, c, g, or t
  misc_feature (1669142)..(1669347): n is a, c, g, or t
  misc_feature (1761210)..(1761436): n is a, c, g, or t
  misc_feature (1817747)..(1926046): n is a, c, g, or t
  misc_feature (1933147)..(1933397): n is a, c, g, or t
  misc_feature (1963959)..(1964336): n is a, c, g, or t
  misc_feature (2150494)..(2150592): n is a, c, g, or t
  misc_feature (2196724)..(2196932): n is a, c, g, or t
  misc_feature (2250718)..(2250774): n is a, c, g, or t
  misc_feature (2391514)..(2391805): n is a, c, g, or t
  misc_feature (2493520)..(2493751): n is a, c, g, or t
  misc_feature (2532126)..(2532403): n is a, c, g, or t
  misc_feature (2536272)..(2536513): n is a, c, g, or t
  misc_feature (2786514)..(2786770): n is a, c, g, or t
  misc_feature (2859475)..(2859766): n is a, c, g, or t
  misc_feature (2873886)..(2874990): n is a, c, g, or t
  misc_feature (2881507)..(2881812): n is a, c, g, or t
  misc_feature (2897061)..(2897239): n is a, c, g, or t
  misc_feature (3050629)..(3051353): n is a, c, g, or t
  misc_feature (3057144)..(3057395): n is a, c, g, or t
  misc_feature (3069494)..(3069869): n is a, c, g, or t
  misc_feature (3075725)..(3076099): n is a, c, g, or t
  misc_feature (3305006)..(3305103): n is a, c, g, or t
  misc_feature (3318292)..(3318616): n is a, c, g, or t
  misc_feature (3502594)..(3502708): n is a, c, g, or t
  misc_feature (3537879)..(3538462): n is a, c, g, or t
  misc_feature (3783308)..(3783522): n is a, c, g, or t
  misc_feature (3992172)..(3992290): n is a, c, g, or t
  misc_feature (4005072)..(4005335): n is a, c, g, or t
  misc_feature (4027270)..(4027470): n is a, c, g, or t
  misc_feature (4058374)..(4058520): n is a, c, g, or t
  misc_feature (4267290)..(4267327): n is a, c, g, or t
  misc_feature (4352793)..(4353255): n is a, c, g, or t
  misc_feature (4361792)..(4361944): n is a, c, g, or t
  misc_feature (4393710)..(4393943): n is a, c, g, or t
  misc_feature (4451442)..(4451579): n is a, c, g, or t
  misc_feature (4461471)..(4461717): n is a, c, g, or t
  misc_feature (4481177)..(4481295): n is a, c, g, or t
  misc_feature (4533818)..(4533955): n is a, c, g, or t
  misc_feature (4590078)..(4590306): n is a, c, g, or t
  misc_feature (4668900)..(4669232): n is a, c, g, or t
  misc_feature (4737074)..(4737168): n is a, c, g, or t
  misc_feature (4766696)..(4766893): n is a, c, g, or t
  misc_feature (4834476)..(4834783): n is a, c, g, or t
  misc_feature (4927466)..(4928039): n is a, c, g, or t
  misc_feature (4945079)..(4945229): n is a, c, g, or t
  misc_feature (5082499)..(5082647): n is a, c, g, or t
  misc_feature (5112540)..(5113261): n is a, c, g, or t
  misc_feature (5314617)..(5314810): n is a, c, g, or t
  misc_feature (5372550)..(5372977): n is a, c, g, or t
  misc_feature (5458853)..(5458964): n is a, c, g, or t
  misc_feature (5480164)..(5480337): n is a, c, g, or t
  misc_feature (5535306)..(5535320): n is a, c, g, or t
  misc_feature (5567454)..(5567593): n is a, c, g, or t
  misc_feature (5598682)..(5598895): n is a, c, g, or t
  misc_feature (5726706)..(5726784): n is a, c, g, or t
  misc_feature (5743217)..(5743685): n is a, c, g, or t
  misc_feature (5807375)..(5807461): n is a, c, g, or t
  misc_feature (5919721)..(5920399): n is a, c, g, or t
  misc_feature (5921713)..(5922019): n is a, c, g, or t
  misc_feature (5942595)..(5942874): n is a, c, g, or t
  misc_feature (6011060)..(6011355): n is a, c, g, or t
  misc_feature (6324898)..(6325216): n is a, c, g, or t
  misc_feature (6397315)..(6397426): n is a, c, g, or t
  misc_feature (6604582)..(6604752): n is a, c, g, or t
  misc_feature (6843517)..(6849268): n is a, c, g, or t
  misc_feature (6859623)..(6860263): n is a, c, g, or t
  misc_feature (6914980)..(6915767): n is a, c, g, or t
  misc_feature (6919071)..(6923941): n is a, c, g, or t
  misc_feature (6950390)..(6950526): n is a, c, g, or t
  misc_feature (7009957)..(7010194): n is a, c, g, or t
  misc_feature (7088551)..(7088774): n is a, c, g, or t
  misc_feature (7280841)..(7281020): n is a, c, g, or t
  misc_feature (7435200)..(7435325): n is a, c, g, or t
  misc_feature (7579890)..(7580210): n is a, c, g, or t
  misc_feature (7597887)..(7598036): n is a, c, g, or t
  misc_feature (7639101)..(7639217): n is a, c, g, or t
  misc_feature (7648311)..(7648518): n is a, c, g, or t
  misc_feature (8007231)..(8007417): n is a, c, g, or t
  misc_feature (8052974)..(8053439): n is a, c, g, or t
  misc_feature (8129120)..(8129535): n is a, c, g, or t
  misc_feature (8133830)..(8134018): n is a, c, g, or t
  misc_feature (8188105)..(8188254): n is a, c, g, or t
  misc_feature (8239788)..(8240259): n is a, c, g, or t
  misc_feature (8245696)..(8245807): n is a, c, g, or t
  misc_feature (8304973)..(8305563): n is a, c, g, or t
  misc_feature (8313929)..(8318046): n is a, c, g, or t
  misc_feature (8345244)..(8345345): n is a, c, g, or t
  misc_feature (8407624)..(8407830): n is a, c, g, or t
  misc_feature (8424515)..(8424640): n is a, c, g, or t
  misc_feature (8481408)..(8481631): n is a, c, g, or t
  misc_feature (8596929)..(8597175): n is a, c, g, or t
atggcaatgtgagtgattccgaaacaaaactagcttttcttccaatactgactccgcctgatattgcagcagaaacgagaaatttgccatgagccaaataaacgcgttgataacgtatatcaaagctgctcgcccaggatgcctttttttcttcaaatcattggagaatatcgcaaaggcaataatgtttgggcaactgcctggtgacctgatccaggctttgaatgaaaaggaaggtgaccttctcggccggactacactgatgcgagtaaacgagcaggatgagatgagcttgtctattcaaaaggactcagattcttgggaagatgtggagatggagtcactcgcgttgcagaaagctgctttgttttttgaaccttgaaattgttgaaatatgtactgtataggtaatatttctattcatcgcagagcgcttttaggaatacgttgagcttgcgtttcatgaaaatattttaaattcagactttgtatcagactgggtatttttttttctgaaacaaagtagggtttttacttgaagcagtgtggctcatctcatacagacacacacatacacacacacacacacaattcattacgcccggaggtatcaagcctagagggcacctatacgctatttgatctttccattgtatacattttgtcatagcctcattttcgagaggaaaagctgaaccagctgcaaaaaacccctccagcccatacggtatgtcttaacgatttctcttcttgttgttgttgtcatatcatctcctccaaaagcaataacccatccctctgtgacaccggaccccctacgtgtccattctcgatgtagttttcgtgaacctcttccctgagtagcggtttaccgagagtacttctcatattaacgcccgaagtagctgactgcctcgctggcagcaacaccagatagcagacgaaggactgacgaatcgacatgcgatcgaaccggtagggcaggtgagttattgtgagcaaaacccggtgagggtaggttgaaaatgtgtaggcaggtcggttgttcgaaggctcgtcggcattgcgacgttgttgacgtgtccttttgaaggcttcccgccgcgtcgtcacaaccaataaaggagtttccaccggagtttcgatttgaaaagttctcagtttcggtcagacattgcagtccaacttactgacatccctccccacggagaaggtgactttccatgagggactcatctcatacagtaaaattcgaaatcagctttaccaccgaactttttcactctctttcccagcgccccacccagattgcgctaaactgtatttggccacggaaggtcccccagactaatggcatatgtaccttttgccgatcgtgaaaaataccgtaagcccgattactggtaccagacaccctgcgttcccaatatttctctcccgggcctgagtggcttttcgattgctctaggcttctaatatcaaacttttgaggcttattttccagtgcaatgattcactacttcgcgatgctaattctgtgatgtatcccaagcagatagctcccttacatattcactgtggttgagccatttgtgagccctggaccctggtcaagcttttactcaggttagacatcttttcattttatcacctaacacacaagaggtcttgatgatggcctagcattgtcattattagactaatggtgtgtgttggacaagtctatgacaaaaattgccacccaactcaaaatgtaaagacccgactcttgtgtgtatttctcggcaataaataccatgacattgctgctgatcggcagcttgctgagcggagcagatctatcataaattcttatttccgtagtaaagttcttccgcccggctggcaacaattcagctgtctctttcaaacccctaggaggtctgcctttgcatccatcatgagagttcaggcgaagtcctctttgtccttcatctttgcgactagagctcactttacttgaaactacgtttctggaaaatatgtcatcaaaacttccatcaacgtgtatgtgctgtgtaaactgatcaccacccccttgaacctccagcgcagcgaattaataaagccagcaaacgtggcaagccaggctccacaggattacgctcctgctcagcattttgccctcatctatatggatcaatatgggacacttcactatgaggcgtccccttcaatcgtccattatcgcgacactatcctttcccctcaagtcaccgcggaattcctgaaagcggtggcgaactccactgaagttggcctgcgaaggtcctccctggaattcgcttccacccagctatttcctgatcacctcgggaactatgactctcacgattctcggtttccgaaaggaatacaggccgagggacacgatgtgcctacaacatatggatatcattcacagcctcacctatggccaggccatgatatagctacccccgccatcttgaaagataaagtgcttcacaagaagagatcttgtttgcagaagcacggcctggagctccaagaagcaatgttatccatcaaagatacgaaatttctccgccgatactacgaaaaggtcttccacaatatacagcaaaccaattgccgagtcctggcaaaagcctatgtgaaatgtgttgagccccacaagcaagtcaattacccttataatgggcggaagaccgtggcgggggaaatacgacaattaagttccgagcagagtaagccaccatggtggcctcctcaagtgcgccatcgggaacccgatcatctactcaaagcaggtaacaagacactttactgcgcatgatacccactaagctcatcatctcactagaacgcatcgcgcttcttctccatattctttgtgatttgcgctgcagtcacggcgtcacatcacaaaaactgaaagatgcagagcaatctgttcggtcgcatattatcccggttgaacgtttagaactcctagatgagttgtatcgtgttagaggagaagaggaaaagcttttgatggggcttcttggtaagggcttgcaaccacccattcttcacaagctaatgaagtacatctagaaaaagacgcagctgttcttatctcgcggatcaatttacccgcttccaataaaatacccagcaagcaaacccagccggacagttgggtctctctgaagtacaaagagggtgcagcaacatacgaatcgtcctctcacaaacaagatttgtacaatgtgcctatatacccgcagcgtaacttcacaggatacaccactcgccaagaagacatgatggattcttttccggtcccggcaatgtcatccactccacttggaaaaaagcgcccgatgatcgacgagacatatccttctacggcaattttcagtcccacacatttggtatcctcgcagtgtgtcaccagccattctttgtttgtgaatcttccagtaatggaggatgtggggcctaggctacaaaatggtcccggattggttcatgctgaaatggcactatttgcagatcgcactcaaatttgcacaatttagagatatttaccatcacttactctcactgactctagcctgtcttgtttactctagtcgccaaaaaagataaacaagacattttccccctggaatagggtctggttggcacgccatatagcaaaggtataagcttttcacctacatgcatccattaacatatttttttcaccaatgccaatcaggtttaggctgagagagttcttgaaagcgtggtctctaagtgaaagcctgtcacaactcagcttttccatgtgtatcttccaggtcacggggcataagagtcaacgagatagacacttttgaaaaaaacactctatgagattgtagagagatcctcagtcaagaaatatgctaccgcatactgtgatagatcgtctatgcattgtgattgagctaacttgcggcgtaaaaactatccagtgctgcacgagcagaagtcacacttgctttgagactagtgagcgcgcaatatgtatgaaggaaagcagcttcttctttacaatgccccgctctatctccgtcgtccatctttgtgctcgctattcgaatgttttcacagctctcattgatcctgtacatccctaacatctttgatttgcgtcgaagatcgtcacagaatgatcgcaacagaagtgtgtcatcatttaagctgatagatgttagcatgctgcaaatttaacgtaagtttgaaggcttacaaggctttctccatttcctgagtcgcagttattgccactgcaatatgtgcatatagtgttgtagagctggttaaacgattttcctcatgatccatctctagcagttgcgagaaaattgccgcgtcaaaattccgcttaaggttgctttcgaattgctcatttgtcatattttaaaatgtaatcaaagaagacctgcatgctgtagtagtcgcgctaactgaaaaataaacgcctggtgggaattcttatatgcagtgagaaatgagtttgtatttgccgctgaagaggcccagagcaatcgaaaagccaccccaggcggcccggatgattgggaacacggggtgtctggtaccagtaatcgggcttacggtatttttcacgatcggcaaaaggtacatatgctgtcggaacgtggtcgttacagtacggactagtacgggcatagccaattgagtacttgagagtgtgttttctatatactatagaaagtgcagaataaataggggatgagcttagtaaggtcgttgagagccttacgatcgtcaggcagagggggtgctgaatattcctcgggcgcactagtaaaatggcgaccctcttttgttgacatatgccattagtcagggaggccttccgtggccaaatacagtttagcgcaatctgggtggggcgctgggaaagagagtgaaagagtttggtggtcaaactgattgaatttttctgtcgatgattctcagtgagccttacccaagttcgagacctattctctcccatcaatcaagccgccagggccaaaatttcaatgcaaaattaagagtagattattctgtggtcctgcaagacacgttacatataaatgccaattacctgtcaatcaaaactgttaatttgatttatgcaagaatgagagattgatgcatttaaccatcatcaaatgaggacctatattaataccattccaaaccttactctttgtaagaataaaaagtacatgcagagacgatggcaagtcgcgctagcccaactaagctgccggtggaacaagttgctgcaacaagcggatgctaaagactgtcaatgtttgatttaatcagaaaatattgcttcagcttacctgtgtcagttccattacagacctagctgacgttgtcgatgatagaaaatcaacggcattcgaatcgatgggccaccgagctggatcgtctatccccacattctctttgacatatttctgcatcagctccattgtcagagatcccaagcctttcaaggacaaagactgagattgttccggcgtgtagggcacagtgagttctaaactagctatcacgacaatcagtctttcaccggcgattttgaagtgctaagtacaataccaattttcaccactccgtctaaactcattagagtagtggagcactttaaagacgaatgttcatagccgcattcaatcagataagacaatccgtccatgacctttttcatatgagcaaagtcgtctttggaaaacggcggtaacaagaacttacttgtttgacaatggaagccagctggacctcactgggataggcatcgctggcgaccaggtgctctaaactgatcggtaggtcatcaacaatgaagtggttcactccattgtccttgaaacattcactggcagaaattatgttgaagtggtcgaagcgcgtatatttgtggagtgactcctctccatcggttcttgacgagcttcgtatggctactactttagaaccccggcgacgatgttcgcaaatcgatactgtaccggcaagatcgcatgtaaatatgggcttataagtctcccacggggaacaagttcgtataagtggagtctgcgccaaccctccagtatcgacaatggtggggagctccagtgtttttggcgaacctctcagaatcttgcgagagcgatcttgctgagccgcagggcccttttggtatttgatagagctttgggtatggcctggctgatcagtgaaattgtgaggctgcgtttctgctgccgtgaccgacgaagagaaatgcgcctgagcttgcaacatgtcaaaccgagtagcccgtttgtcttggtctcttttcatgtttgaatatagactctagaagactttcagaggaaaagaaaccaggtaccatggggacagcggtagcagtgtttttgtagggcacattcgagctgccatccacagcgagactatccgcagcgagccttgccatctgccaatggccattcaacgacctaagagcttaaatgcgctctgatggccgcttctcaaaccacattttgaggaaatcttatttggggattccgagatggaacaatctatgttcacagatgcggaagcacaactgacaactgagcggcgcctgaagtaccaaggaactgccaagatagatctgagccagattacatgtcacccatgcgtggctcgacaactggaccaaaagaatgttgagagactatgcgaggtatttcggaaggatggctgtaatcgacttgatgtgcaacatcatgttacagctgttgtaacccgccgacacttgaagcacgcccggcgggaggcacagataaccgcggaggaattgctgactaatcgacctgataaatacccgttcctttctttcccctccagccaaatccagtgtctacatggtcaacaccgcctgcatgctgcaacagaagtccttgctcctagtgagcgatggtggacggtggacctctatctagatggtgagtttcgttttattggctcaacttctattttacagccttcatttttaattgcctcgttcggtctgacatttatgtagacattagccatgaattacgaaataccctagtcgatgaatatgcaaacgagaagacacccactgatggagacatataccgcaaaatccgacaataccaaagcgagcataatgcagcgttccagaagcggtggtggacgcgtctttcggaaaataaagctaagcgtttgcgacaactgatgtctcctgacaacgtcgacatttgtgccgcctttgatgccctacttcccattccaggtctgtggaatggcctgagtatcggctctctcaatcgtgtactagcattgaagtgcgatgaagttagttatcatcgctttccccggcttccactcatttttcgctaatgacgaaggaaattatccactatttacaacatgtggaaagattctggtcgactctaatggatggcgatcgacatcagatggccaaaatcgacattcataccgtggaaaagcttcaactgagagccccagcggcatgttctgcggatgcgagagaagtcaaaggctatatactcggcggtgaggtcttctcccagtttgaggagactgaacaacctagaatatgggatcgaatgtccagttatgacgggatcattccttcaattcacacctttttccgcgatactacttatctcgaggcgtgcgcaaccggcgtgcggcagtttgctgttctgagcaagagccagccaacagtgcgagccgccttgaagcatgcctataagcctgacacgaccaggggggcatgtctcgtgcagacatcagatgcgagctttcggaatcacacaggcccaagcacggattcttttgaactcgcctatcgacaaatctggttatttgctatgcgccattacccggaaatggccaaagatgctaccagcaagaaagttgtcgccaagaccatccgcggaagagcggacgaagtagtgctccacaatatggctacactcgcacagaaattgggatttgactctttgccggtcactgaaatgttgaaccgttctcccgaccgaagaattgctcgcgaagctctactcaaggcccgaaaaccgggtagctaccgatatgaccccgccacattcgattcactcattgaccgattagtggagtgttttggtaccgcggtcgctcacgaggctttaccatcgccagatttcgttcttgaaaggacaccaacgctttcacgtcgttgtggtcccccactcgagcatgtgcagccgatagatcgacctcaccttttcctaggcaaagtgcattccaaagaagcgacagggccgcagactatctcctccttttttgtgagacaatgcgtgtattttgctttctttgacaagcctttgacatggacacaaagtcaagaccatgatcaagcttcgcctgagctgctgcaaacggacgtttctagatcccctctgttcgtaccagttgatgacttgccaagtaacccacgagtggtcccagctacgggatcagcttcacaaagacaatcacgccgagagcaacgccaagaacgacgccgtcgaagacaggcaactggaaaccggtcacaccgagaccggcgacaggaaattgttgaagaaatacatcctgccgttccggccgatccagtcgactccatcactgctgatgatgatatgggtatgaatgacgtcgcccatgttgttgctggtggtgcagacatttccatggcaggatcttccagtgagagtcccatcggcgggagtgatcatttagcgatacagaacgagttattccgcgacaccagaagagatgttgaggagaacccagagcttttgccaaatgtcgagcaagacgagcaagcgcttgctcaagtcagtgacacaaggcgcaacttgggagacattgtacacgaaccatcaactgacagtccaaatggccatgatactgcagagcgacaatcggaagtgaacgaggataccgcctcgcaatattctcaggactcttcacgaagcggcgagaacgactcaatggaatatgtggagtccgtcgtgcctgctgagatgcaagaccggttgacaagaggagtgtcttctgatgcagatctacaactcacgtcgtgccctgttgaggcggatagcgaaagcctgaatcaacggaccgaggaaagagaggttgcgcaagatgcagtacaacaagcccttcggatgcttgagcaggaagcagagacacgggcacatactagtatagaacggtcagaagagcaatttgccacgtcgaccgatgagccaactgcttcattagagcttcccagcccaggtgtgggaccggctgtgaacgcattggctgaatctcgcatatcgaatgaacattcgccagccacaactcagaatcctgacccgattgttcggcaaggtcgagtgccacgaaacgcccgagcagcaaagaccatcactcaaattgatttgactgggctggatgcagcaattattgtgggagaggatggacccgaccagcaagagcaggctgagtcaccaatcatcggtcgggctgcgatttcaacccctcttggtcaccaggaattgtcggagcatgagcagggcacagacaatatgggacctcgagagtttctgagcgatttgcctgatccttcggcctcaaatccgatcataggtgaatctactggcccgcctcgacccgcagcgcttcagatctcagcaggggccacgggagagggcgggcccagccaacgagaacaggcagatgtccaaataacccatcatgatatggcatcaccagtctctaagcctccggaacccaaagagcatgttcgacagacgaacaaaaagaagctacgcgaaaataaggatgactcgcaagaggctcccgcctcaggccaaaacataagtgagttcacagttccacctctgccggaagcgcttcgcccacgtcggaaccctccacccaacgcaatcacgattactttcaaaatttatgagaatggaggatggcatgtgacggaccaagtgccggtcagcccgaaggacccatcggaagcacatcgtatagcccacaagtatgcccgcaaggacaacaaacatgcgcgcttctacaacaagaacttacgactagtcagcgctgctcaatgtgtccgggccgcgatggatgatggatcgaataccgtcctcatgagcctacaacaggatctcgtagtgacacgagccaaagtggctgcggtggccgagatgatggaagcggacgctcagagaagggcagcaactgatgctgatgatataataatgtagtcaggtttcgaactagtcttgagtcaccaggcgtcttaagctctgagacttatggcttagcaggtcgtgaaattgtaggggatataagttggcattctaatggcctggtaggtcttgagaccgcggtcttgggacctgctgggtctctggctctgtgtctaccgccctcgggtcagtgtcaccgagccctagttcgtagtcttatatgagcagatttcagttttaggttacatgtcatcagctttcaaatatgtttcttataattgcccgggatttaagcctatagtcccatcgccttggtggccttctgttaatggacacgtgctgaacttgggcttcgatcctctcgggctataggagtacttctgcagaaccttcatagtcccaggacccctagccacgcagttaccattcttttacggacctagatgctcgtcctatatgtgaacttattttcttgcacttggtggaccccaatgagcattaaaatcatatacgaaccaaagacaaagatcataggaatcactgtcgtgtcgccataaccagagactccgtcacagttgagtgaaaatcaccagggatatgcctgtcaccaactgcatccctcacgtcgagcacatcatatccaagctcagcagccgctcgggtagtggtggagacacacatgcgccatatagccaaccaacacgactttctttcctacatcgcctagaccttgcagataggcatgcagatcggtctttgcagacgcactaggaaagtctttggtgatttacacaatgtaacactcctgtttcttcacattcgtgaagactttgccactctagcatgaaagaaaatagtaagggaatatgttcgattgttgcccttatggcctgtgatctgtggcttaaaagccgcatcttgtaagatagtttctgctatatccaatcaaagccaactcgtgcgtcatgtagaagagcagatgcttgagatatccagtttttcgcatctccattatcccgtccgactgcggatgaatcagacttgtttaacacctcggactcaccgcccaatggagcattccacagctcatcactgtctggcatgcaaaaggacaagtcggccagggtcaaaagattggttgtgccactattggaacattctccgctcaagtcaaaggaagcgggagtggacaatcggcacaccttatagagggctagtccaaatctcttgatctcttcaacgctcacatatacaagcgcgagtggtgcatcggcatcgtgttgcagaagcatgttgggatagtagaaaataccccaccgtcgacagctttgaacaagcgcagccaagaggtcgtatttgtcgtctggtaatcggcatcgcatgctcaaatctgtactagcattctctcttgcaatgaaaagagaaaggatgatattcaagagcacactttgaaatgatgttatgggccacgtggtatttgtgtgttggcgtggactcgagttggagatgcaccattggtcctagagcacaagaatgagattaacacacaattctatatacagttaatattataatgcttcttcttctcaccatttgagcgttaaatgcggaacatagtctattatgtagacgtattgatgcgtctcgtgcctcctgagtccctttaacccaaagtccgattgcgacaacggattgaacaagtacacaaggttccttagcaaagtcaaatgtacttcgatggagaaacggccaccttgagtggaaagtatcaaagtaaatatcaatatagtcatgagcaatccaccggggagcgtcagaaacggaatcattaatcgtggaaacaggcggcaaagggcaaagatcatcgatcgaaaattgttgttcgcctacggtttcacccccactaggcacacagaagacgccgcgatgttgacaggcattgcatggtaatatgccatcacaacgtactttccgcacatgacatgcaatacatgccctaaatttccgagacggcggcggttctctctgcggatggtaagtccggatatggcgtcgcaataggtcactgattactctctgagttgaaagtcttcccacgggatcggagaaactactcacttcctggtcaggacgctctcacaataaggacagggaagattgatttccttatcatgatgattacgatgtcgattcaggtgctctttacgccgatatttggcgttgcaatctggaaagtcacattggaaccacaaggggacagtatcggcatgaggcggcattgtgcagaatttttgcaaacctctggattccacaacattgtgaaatggcaaaaatggaggcaaaaagggagaagagaaggtaatgactggagctccggtggggccccgaggaaagtcaccaatgaagttacaccggtcatcccgcttgatgagtaactccacaggtggcgctaactatatacatatccgtggataaaccggcaagtgggataggccgaccatccaagtgtatatctataaatggcaaaccttcgaaatggtgttactccttttactgcctccactatcttggaaagatctcttggcagttcagtggatctcaattggagtgcaccacaatgcccaacctctatcaccctgaaacattgcgcaacgactctgaacaaaccgacagcgtcgatgtctgcaccgaaacctacttcgcctcacatcttgagccagcaatttccaaactggccagcatacatgcacctccggaattcgaagtttactgggactctgacgaccccgaaaatccccacatgtggccgctttggtacaaaggcctcactgtcgctgctatgagtcttggtgctacagttgtcagtctctccagcacactgtatacatctggaattccaggactacaagatgattttcatgtttcgaagatcgtggctctccttggtgtcacgacttaccttcttggaatggggataggcagcatcatttttgctccactcagcgagcttgtgggacggcggccaatctatattgtctcaatgataatatttttgtttttattgttaccgagtgctttagctcaaagcattgcttcaatcctcgtgagcagattctttggaggattctttggaagtgcattgatgtcgaactcgcccgcatctgtgaatgatatcgtctcggataagcaccgtgctttagcattcggcttctggtctattggccccaccaacggccctgtttatggcccaatcataggaggatttgtgttccaatatcttggctggaggtggacaaattggattgtcctcatcattgggggtgtggtcctggtcctgatatcctctgtcaaagaaacttacgcccccgtgatcttgaaaaagcgcgccgcgattaaaagaaaggagacacaggacccaaaatggtggacacgctatgacgatggtgtcggctttacatcctcactgatgatcaatctcaagagacctttcgtgatgctcctaacagagccgatatggtaaactatctccctcccatgctacaaagccaatgttaacattctcgtagtatattttgggatggctacgttgcgattgtttatggcatcctttacctatgtttcgtcgcgtatccaatcgctttccaacaagaacgtgggtggtcgccaggcatcggtggtctttcattcgtcggtataggcgtgggtgtcttgatcgccattgcatgcgaacccttgtttcgtaaagtgatcaatcttcatcgcaaggatccagaaaccggcatggtacaaccagaggctatggtcagtgtcgtcttttttggtgctactcttttagccattggccagttgtggttttcctggacttgtactccaaacgttcactggatcatccccatcctagccggtgttccctttggaattggtaatgcatgcgtcttcatttacgcctcaaactacattgcccggtcttatggcatttacgccgcatctgcgcttgcaggaaatatgctcactcgcagtgtcatgggagcattcctcccacttgcggggccatcaatgtataagactctgggcttgaattgggcaagtacaatcctgggaatcgttgagacagtatgcatcttgattcctgtcgttttctacttttacggacacagaattcgaaaggccagtcgctttatcaaagaggtagaaaagctgcaggcagcttgaaaaaacttattagcaaaatgttatatgtgctttatatttgttcgaagtgaaaattgatgtctacgataagtcattttataacaacgttccaaaattcatctatctcctaaacggtggaccgtgacaatcctttaagatacggtgtcttgactaaggaccaagctacagttgggtataaagccaagagaggttacctttttcttttcgtggtttcaacgggatttccagaataaaatacatttagtcggagtaagccttcgagcgcagcagatagcagttgtgttgttgtgaaggtcatatactcagcaaacattccaacccaaaacgtaaattacacactttacggaatatttgtcgttgttccatctagtgattttgaattatccccaccatattaaaccgtaaacagtcagattctccgccaagccttttgtgtgcaaccttgaaagtggctacgaagtggcaattgcttactccgtaaagagtagagaagaattactcaaattgattcacaaccactgtgctgaataaacccgtggacatcccgcagagatattataaatttctctccattttcgtggcaaaatggaactttatctctacgggcgggatgagccgaacttacatcatcagtaggatgaaacagaatttctaatattttcagaaaagcaaagtatttaaacctcggtttcccatgaacagagggtctccatatttcattccattgaatcacatccacagtatcaaaagttcacatccccgactttcgctcttaccgcagccatggcagcaacatccaaaccaacccttacaatcacacacatcaccacagcaactgccattctcaacattgatggagtcaactttctgacagatcccttcttcggagccatcgaagggacagagtatgattcgaccgcggtctgggagcaaatggacctgaaaccgtacggtctcgacagcatccccccaccaccgcaccttgtcaacaagcaaggaccagcgcttcagctcaatgaactgccgcctatcgatgctgtccttcttagccatgaggatcaccttgacaatttggacccagaaggccgtaagctgctggatggtcgaaaggtgtttaccaccgtggacggtgcctccaacctgcgcccacgcccaggagtcattggccttcgcccctgggagactgtgacttcttgtatcggagggaaaacgtaccgaatcactggtaccccttgcaagcacttcccagttggagaagttacgggcttcgtcctagagaccgattccttcggtattgatccatctggcaagcctaatgcaatctacttctctggagataccgtctatattgatgaactgcaagagattggaaagagatggcacattactgcatgcattttcaacttgggcaatgccacctttgaattcccaagtggccctattcagattacaatggacggtaaacaagctgttcggcttgcccgtgatattggcgccgatgtcatggtcccaattcatttcgaatcgtgggatcactttaaggagggcggagcagagttgctggaggttttcacccaagagggatttttagacaaggtgtgctggacagttcctggcgttcccaaggttgttttttgattgtgaatcaatctatcaatattgcggccctatggccctctttctgcttttatgcttttcttttcttttcttttctttttaccgtaagttgatttagacaaatttctcagacccaaagctaagatattttccaaaaaggaacatatcacgaaacagaaaaatagtccctcggtagaaatagaaaatctctttctattctcaccatttgatcttcaatgccatacaaagcagggccttattcaatggctgaaatgccgcgccactcctcgtttaatttttatcctttgtttgaggttttgaaatgtaacatgacgaagtccaaatgacccagggccctatacattctctgcagtgaagaatgttgtcggggctgaatgaaacctcacgtttcacatgggagtttcgccaacagatatgtcaaagtcatatagatgcggtaaactatccattgcggacagaatctctctccatgttccagtctcgagcttcacgtgccttaactcgatgtacttcatcgattcactgcattgctctataatattgacgagattttgagatgaaattttcacttcgcgcagagacaaaaactgcaggcgaacagttgagccgagcttcagacgatcaatacttagatagttcgtgctgctgagcgagagtgaagtcaggcttgtcgaaagctccgcgatgctcaacaagtgggccgcacaggattgctggtttgtttgtgcatagacttgcaatctaagatggtgaaggcgactgagagtctgttcaatcggtatccgcaatgtgctgatattctcggcaaacaatggagcaagatcattcgtcatcggtaactgaagttcaagttctgtcaagttgggcagaggcacgtagcataacgacatgagcatcgagtcgatcgatgctttcatcttgtcatggggcaataatgtcaatgaaggaccacggaagtcgagagctttgagattgggaaattgacgcaagcataaagacagcaagccggcaaggtcttccgtgtatgatgtaacctcccttatcgagcatgggaaggaaccatatccaatatcgacttgacgcacatagtgggcataggggctgttagaaaggctcaccagctttcctaaggatggaaagtgcctggtgtggtacaatgaaccggctagggctataatgtggcggaaaagacgggctgaggcactatgacacaagcttttgttgaccaagcggagttttgcgagattcctccgattataattgttcattattcgaaattctcgaggagccgacgtctttgaagaagattgcgaagtgccgatctcgacataaaatgtaatctgccaaaagaattgttcagtagtggcgcagggtgtggactggtacaaatcatacaaggtcaattatctctgctggaaggtacatatcgatcaacgtttaagcatctttggcaggaaatcaccctgctaaaatattgactggcttcaagtgttgcgtgagcccctgcggtcttaccacccggtcccaaatttggaagagaacaggagcccacgtaagagaaagagattggcaatcgtcttcaattataccagcctattttatcttcggcgaaacacaaaaccaattttccgttgcaatgtaagaattttaacttgatcttggagtcaaaaacaaagcatcagacatgttctacccatggacatttaattgcattcccaaaatctagtcttggcgggaaaactagccattttgagacggttgaacgccacagtgggtccgtaacgtaaacattctgtactgtgtttgaccttcacaacactaccagtcgtcctctcaagcttgctctaatatgaggagaccctgtctgctgcatcgatgacgaaaaaatataaccatttctagcttttatacccgtgtcttagtctctagccaatacatttcctcttaagcgtgccctatgtacctaactaaatggtgtttgttctgttattgtaggttgaagaaagttcatgaaaacgcacggaaaacatagaaaaataccgggtatctcggagtatctctacttgattgctaattgatcatcgctgccctggggatatgtaaccatggatcctgctggtcggtatcccgcccgttctcggaccgaagagatgcacgtgcaccctggctgttctctttgcaactacttgggcggggatggtgatttcagatgtggctgataaatcattccccaatgtccttggatatataacttaacccaactcccgaataactgcattaatctggtaaaccttgagttatgacgaaatccgctaacttcggtacttccaatatgcggtgagtctcttcatgaaatcgataacattagttgtgctctaacgcccaattagaaatcaatccaatcatcccgccaatgctgaggaagaggcatattacgaccttggttcgtatcgtcgatcagtgaccacttcgtctgcggaaacccaattgtggttcaatcgcggattgaaatgggctcattctttcaaccatggcgaagcggtccgatgcttcgaacgagctgctgaaagcgattccaattgcgctatagcgctctggggaattgcgtatgcgactgggcccaactacaacaaggcgtggagatactttgacccagaggatcgtcaggcttctatcaagaaggtcaaggatatcctcacccgagcgtccaagctagcgagccaggccacaccagtcgaacaagcgttgatcggggcaatcggcgctcgtttcccaccaattgatgacatccccgaggaactgggccctttcgaccgcgcgtatgcggacgcgatgcgctctgtgtatcataagttcagagatgatgtggacgtggctgcgctatttgcggaatcgcttatgtgtatcactccgcgcgggctatgggacttgaacactggtaaaccaaccggggatcacaccattgaggctcgcgaagtgattgagctgcaactgcaaactaccggtcgcagccatccagcaatctgtcacttgcacatacacatgatggagatgtcgccatttccagaattggctcttccggctgcggatcgactacgtggcatggttccgcacgcttcgcatatgttacacatgccgacgcatattgatgccgccgtcggtgactatcgccggggtattgattccaaccatgaagcgatccttgccgacgacatctactttgcccgagagacgggtacaactatgtatgcggcgtaccgggtgcattacgtttgtgcaaaattgtattccgctatgatgtctggccgattcacggacgcgatgtccgctgcagaaaagcttgaacagatcaatgatccgaacctgctatccgtcaaaagtcccccaatggcagacttcatcgagagcttcgtgggaagtaaggcacacgtgctagtgcgctttggtcgctgggaagagattcttgacctcaagcttcctgccgatcgcgatacatattgcgtaactacagccaccatccattacactcgcgggcttgcattcagtgcacttggacggattgcagaagccgaagccgctcaaaaggagtttgaaatggcgcgtagggccgttcctagctcccgactcaacagcattccgtgcaaggaggaagatgttctcgcagttggatctgctatgcttgctggtgaattagaatatcggaagggaaatattgagacggcgttccattcccttcgggaagccattgtgcacgaggatgcactcgcgtacactgacccgcctgcctggatgcagccagtccgccatgcgctcggtggcctgctccttgagcaggggcgtatcgaagaagcagaaactctgttcaaggaagaccttggcttcgctcttgactatcctcggcgtaaggcaaaactcaataatgtttggggattgcatggcttatacgaatgcttcagtcgccttggaaagattcaagaggctgctttcattcaacctgcacgggatattgccttggcatctgctgacattccagtcaatgtttcatgcttctgtcgaacttcttcggtagcaaaggatggatgttgttcatgattgatcattgttgggtggcctgggggattaagcacgcacagtaaccgcacctgctgtttgctataaccatggagagctataaatagctttctttatttctccctcccgtccatcccgtttgataggaataagcatacagtttaagcatacattttctccgtacagatatccgtgtatgctgatttctagaactatcattttgctggggggtcacaatccggaaggcttcaagctgcacccgaaatatgttgatctcatccgtcgacacatcagtgctgggaagttgctttttacgacttacactggctcagccgtatttgcgtctacggggctattagatggaaagaatgcaacgatcaatcacgcggtgtataaatgggcgaaagagaattatcctgctgtcaactggactaagggggaaacatgggtcgtcgacgaaaatatctggactggagctggtgctgttgcgggtatcgatatggttgcaagttggctcaaggagcccttcggactggatattcttacatacgctgcccgcaatctggactacgagcctcgaggtatcgatggtgtctcgcttgtgattccgaggagatacgacgaaagcgggaagcaaatcagcacccatgaacttttctatcattagcctttggattttaaagatgtgaatttagggctccactggcggtacaccagttgagaaatccaaatgttgtcattcttattgggtattgtaccctaaagcccgtaggtatatatcaattccaagatccttgctagagcaatgcgctttccctacatactcaattcctcgctttcaataattggctacacaaggctactgttcgttccgtgaaaagatttcatatatgtcaggaattcgacgtgaactcaagatttagatataacctaccagctcaaattacctgatttagacaaagcaaacaaaataagtcatttattgttgattgaagggaactggacccgtcacagtcgagtggaaatcaattgcatggcgttggaagtgcattactttatcaaaatctcgatcgcatatattgcatgcgattttggtgttagctgcaaggttttgaagatgctttcgcttgatatgctttgaaacatcaccatgcgatgcaaattgctgcaaacgcttcttcatatctaaatctttttgtcctagacaaataaagcaaaaaagcggccgatgatcgttcgtgatagatcggaaagcagcctcaagaggagaatctgatttagacttgctttgggtcgcttcgtcatctgaggggtgattgccaagacaatcaagctcgaccacgttattctcaaaacgtttgttgcgcggcagacggcatgtttccccttcctcgaattgacagtaaaaagcgacagcatcgatggcttcagtccgccgacgcatctcctgatccaaagttggcggtggcagactcaacaggcattcgatcagacgcttttgaggtggaggaagctcctccgatctttgcaagttggttttgaccgctttttcaagcgtagcctcagacagctgtcgttgaacttccagcataggttgctcttggtcatatttctcctgaatctgtgataacaacgcatttctggcccgttctctcgcgccgttgatttcttgattcagctttttataagcgtcgtatttaacagtgcctcgatgccgcgagaggggtcggcctagtttttgacgaagctcgtcacgacgctggaccaatgatagaatttctggcctttggttgacagaggatgattgcacagttgtcaggtcttgcggccggtttgggtcgatggtcctgctcatccggcaggctgcgtgcatgatatcctcgtctggattaagaccgcgaattaaggcaggtaggtttttatcaatccttctatcaaggtagtactttagaaaggtgcgagtatcggcatggtgcataatcaaattacgaagagagtcgctcacggaacctaaattaaaagaagccatgattagcaagttgtgaatgcgcacgatatataaatatgcaaggtgagttaccgctattatccaacgctttggcagcgccatatcgcaagctgtaggggcgagcaacttgtcgaaatccagtgatgactccaattgttttgacccacggaagcagtgtagagtatggtagaggcttgtcgggggagatgctcattccttgcaatgaccgttctgtttgtcggaatactggaacatcgtctaaagccggatcgagcagtaatggaagttcattacaatcttctggaatatttagacgaggaagctgatctgcagagaacaaaacctcctgtccctcgacccgtttgaaagcacgatccccaaagagcaagcccagcaaagagacatgtggactgagaacaagcgatgggtcaaaaatgatctcaggaaggatataagtgttcctgcatgctggttaactatctgaagaccatagtaagtccttgatatatccactcactcgtctttcgtgccaaggaacccttttgtgaactcgaaggtgaactcaatcacgattctatgtgggccaccttgcggatctcgaagcaaactgattcgaatatgacggtacatcaaattcaatatggcttgaggacgattggcagtgaggccagcaagttgcaagaagaggcagagctcgatacgatgcctcccatgtccaaatttcttttttgtagtactgatcgcggtctcgacgaccattgtcaagtcctccacgtacatggtggacttttcacggcccttacgagataacttatgatttcgggataattttcggatgacctagaagagtggttaatgccaactatacggtgcggacttaaagtatatggtggacttttcacggcccttgcaggataacttatgatttcgggataaccttcggatgacctagaagattggttagtaccaattatacggtttaaagcgtctttggaaggacaacggtgccgtgattcggcaaaggggggattcttacccggcgcatctgtcgattcatgcgattttcaatcttgccagatgtggctctttcaaaaacaagtcgaaaaaccttccagaaagtttccagcgagctcttccgcttgattccgggtagtcgtcttccatttttccctcgtcgcagattcaaagcccaatccagaaaggtatacaagataccaacggataacttcaagaattcttgctgaggatcttttcgaatacatgcacagaacctgagacggctcttagttagtcatagtgtgtagaaatactaggagtgaaagactaggagtgctcggattcctaacgaagaagtgtaacgcactgattccatctcgtttcaacttggtcaaggagagacacagtgcctttgctgtaatcctcctgggtgtaaacggactcgtcaaactgctcaagttgctgcagatagtattctggcaaatgctcgttgtctgcaaagagctgcgcgacatcgccggcatccttcagctgatcgtcttcgcaatcaggctctgtgggttccgtttcatattggtcatcgccgctatcgtcggagctgtcggagctgagatgttcatcttcatacggaggagagttggcctttcgccgggaacgagccatgctgtggtaacgaggaatcgtccagtgaggagttgaggataaatgctcttggcaaaagagagccagggagggaaaaaagaagtgggaaaactcttttggaatgagtatcaaacatcgaaattccgacaagaccccaaggggaaggccccaatatatgaggccttccactgagcgcagcgtttccgtgccattgtgggaaaggctcctgagagaaaagagggacgcagcgttgacctgaatgaaaaacgcagcctgagtaccaagtgtggagaacaaaatgcaggtgcaacaccctcagggaacgctagaaaattgaggggtgtgctgcgccaagcggagattgcgtggccgtggtcagagatagaagtgcgtggcatgaaatttggcaaatcgacggcctaaaacggccgcacttgcggccatttttggaagcccgtttgccgtctgctaccttaataaagtatagataaagtagattttatacttaactataaccttattactaggtctttaaacttagtttttatagttaagaaagattctcttatactaatttctattaaccttacttatcgctatacctattatataggtaaggattaagtttagaaaatggaaatatatactaaaggtattaagttaaaaaaaggtactagagttacttatccctatataccttatattaaaggaaaaggatatatactcccttttaggaaagttagatctatctattcgaaccttagagaatttatctatctagatatctaaagttctatcttaattgctttatatagaggtaagagatattttattacctttatagataatactatacgttttacctaactattcttacttaagtctagattataggttactgaataatatatctagtttaagacctaccttaagacttagtttaggtatatagttaaaaaagtttatagggataatactatagagtataaacctcttataatttacctaaaatctaaaggaataatataggatcctacttccccttatataaagtagctaaatagtattatagagattaaaaattattaccttattaagcctttagtagctattataatagagtattagttcttaaagtacctctagggttatctcctagggggtattaactatataataaactatctttataccttaaaaattaggatatcgctatataaagcgctatatagtaaaaaacctaacttattaaatctttaggctctaggatactaatactagttcctaattcctaaagaaaaaagataaacgaagttagacccttatatagaggaagctagattaatcgcttataataaaggtaataactatatcctatataatatatagataaagaaaattaaatattctcgaaatattatctttaataaagtactaatactaaaggtatttcctaacctaaagtataatttaaatattaaaggtataaatttactatagtaggaggtttccccttttaatcgctatattctagttaattttttaaattaatacaattattatagagtacctatagagtaattcgacttctccttagttataaacgatatactataagtcctgagttatctacttttagtacctctatattttaatactcctctacttcccttagttaaggataatcttaataagagcctttttagcctagtaagtccttcccttaaacccttaaaccctataattcttaaagaataacttctagacctagaatccttttaacctagtaaataataataatattaatatagtaggtagctttagaaggtttatagaagaataataggataagctaagtacctatattaaagtagaactatagctacctatctaggaagaggttaaataaaatttctcctaggatttatcttaggatttatactatagttactcttattttaagttaaccctagataactgagcctttaacctaacttatatcttattattaagaacttaagaactagttaggaaaccttattattcctttaggtagtataaactaacttaagcttaccttaaaagcctttaaacttgttccttctttaatataaatgttttatatctacttattaagtctttagagattctacttaatctttactctatagtaatcttaaaagaaccttaatatataccttctaagctaaaacctactaatattagttttaagctaaaagattagaaggaagctatatcctatattaagaaagagaagtggcttactactacttataaagaactttcttagtaaataattaatagaatatagaggataatcccttaaggataaggaaggaagggttgtaaaccccttaccttatactaggtatttaaaatcaagtataataatacctataaagtgagacttattacttaaggcttttaataaattaaggatcttgatttctttaaagtttacgcggttattataaagctaatattatttaaaatctttatagctattatagctactataggttagctattatactatattaatattataatagtatttttatatattaagttaaaagaacctattaaaattgaactctctaaagggtaaagagaagaatttcctaattagattagtttcctaataaaaactatttatagcttaaaatagagtccttataaatagtattaactactatataatatactgattactataggatttagtaggatataatctaatcactctatcttttttaagaaggaatataggaagcttcctatctttattataatctatatcgataacctcctagtcttatatacctctaagagcgatatttaagaatttaagattataatctcgaagtactttaatatttctaataaaggatatcttaaacgatatcttataataaacgttttttataataaaggaaaaattctcttattataattcgactatatagagaagatccttatatactttagacttaaaagctataaactagtagctatacttatagataaaaaaatagccttaatcccctataagggtactataactaagttatagattaaggaattttagataaaggttagaactttaatatagcttatagtttcgataaggcctaatatctcttttatagttattaaacttatatagtatgcgaagaaccctagtaaagcctacttctaaatattaaagagggtatttaggtatcttaccggtataaagaatctagtcctctcctattctatagaaagagaagctttactctctagttattataatatagactaggtaggtctatatagtaaaaaaggtctattaacctctggttttatttttaaaataggaggtagccttattttatagatattaaagaaatagccttatatagtactatctattacagagagcgagtatattacagaagtactagcggtataggaagtaatctagttatcctaactgctttctaagatcggtatcgaaggcttcttagtaaagctaattcctatctatactaataataatagggcaattgcgcttaccttaaatcctgaattttatataaatataaagtatattataatccggttttatagacttcgagaggaagtcgcgaatggcttagtgaaatttgttaagattcctactaccgagatagtagtagatggacttacaaagccacttagaagagttatatttaagcgatggatttcacagatcggcctctcggtctataatataggttaagtttatatatatatataagtaggtatctggttttgtttttttatagagagatagtgtttaaactacgctggaaactcgactatttgttagtcgtggggggtgttcgaagttatgtgacctctctccgctcctaacaactatgttagtcctagcagataggtagtttccttttctctcttcacgcaattcatgagaactttccagagtgtctacatttcatccgtagactccttgattcatctctaacaattaattataacgatcatacgattacagagatctcctcaaaacaacactaatgcacgggcgtacatttctagcttagtgcgagcgacgatctcccaggatctggcgtactagttagagatcgagtattagttattgatgaaggtgcaggctacgagaagaagggtgatcaaccagaaagatgatgatatgaagtggatgaaagatgctgatctagctactgccaagaagctctctatatagctccatgctacaaagctaccagatcccatcctccagaaaccagaagaaacatctctgcaggcgtacaaagggaatgccaacacagcaagctgaacggcaagctgcatgcgagagaaacgaaagaaagagagaggaatgccacagagagggctatgaacagcatggggcaacagtgaatacttccaaatgcatcatcatttatgcggtgcgccggactgcgggagatcgtcgccgtagtcgcccgccctaagcctgctatgattcacatcgctgtaatccgtatttcaactctgctaaattcccctaggcagccagcgtatctgaccccaaatatcgagtcatggacacgcctgttgatcttttttaaattcccagtgggtctcctacttaaacagtgttagtgttgtcctaacgaaattgcgctaagcttatttataataacaatagcgcctctggaaaagtcgagtaactcatagatttatgatgatcgtataatcttcctataactaatgctcgatcctgcggtacttctgacactcgacccttggtatcgagttttcgtaagggctgtgtttccaccccaaaggcaaccttgtccatgaaagtattcctgccgggttattttctccataagggccacgttaagattaatagatttaggggattcagggattctagtttctaactattcaatgttgttatgtttggtgttccgaaattccgagggatccccgaccgggtattcctgacctgctaacccctgctagccctattcctgcttcgtttctgaacgcgatgcaacatcaactaatgtaggaggatacttacctgcgctggaagcttgatggcaacgaggactgttcaaatccctcaagcactgtagtcattgatcgctattcaacagggattctgggcagggcaacaacaagcaccatagaccaattatgggatatagcatagaaatatctagaactgtctacctttatgtgacaatcaatgaagcttcttaggagaatcggcggcgtatattcgggctaccgttttgagctagtaatgcagtggccagagggtgcttaggaatactacataggttagggtaagttatacattttctatagagttgatggatctacagaactacttcaactgaggccgaaggatcatggcttattgatatttttgggtatatcaggcgcattaacatgagcctcgggcttcacagaacatagtaacaccatatctacaacgtgtgctcatctttgaccaaatatagtatggaataattgcttgtaaagtatgctggatggcttagcctgctccgaaccctgccattgtagtcgcttattaaagaaacattatcaccagggtctgataccaatctagttaatgatatgcaaaggtggccacgacttccgtcctatgtctatgtatagctggtgctgtgctgtaggacatctccttgactaggcggatatgaaagggtcgatgctcgctatctctgggcggcttctctactaccaacgcactcatctttctatcgttctctgaccaagagccttttatcgaaaccatcacaatgtcgcttctcaaccacgccgtttatgctgtaactgttctggccaccattgccgcagcagtccccagcctaatcgctgccaggggtgaaaatttcctcgttttcaatggcaatagatcccttttggttgaaaccaaaccctctgcagagaccgcctaagacttgatagccatggccgagggaaatatcgattgcaagggctctgctcggtggaaaaactcggttctggctgtcacgatgcttatcggtaggttattcccagcaatacctacggcacttacctcgagtatgtttttcgctaactcgacaaagccattccaatactggatcttgtagtggaccctgcggtctttttttcaacggcaacactgtgaacttatagggcaggatttgatggacgcctacaatgaacttcggaaccgaggccattgcagccattgtggacgcaaacaaatcgctaacagctgtatgatcaagattgaccgggtcatgggttgctaaatggggctgcgccgtgttaatcggataggaggtgcataccatatacatctatttatggtcacagggtcgcagttttggctttcatctagtcactcatgggtgaatgggcttgcacgagtttgaagatgagaaatgctaccgacacgcgaaaattgctaccgtcacgttgcccaccatactactttaggtaagtctcccgctggccgcaattttcaaccagcctttgtaannnnnnnnnnnnnnnnnnnnnnnnnnnnnnnnnnnnnnnnnnnnnnnnnnnnnnnnnnnnnnnnnnnnnnnnnnnnnnnnnnnnnnnnnnnnnnnnnnnnnnnnnnnnnnnnnnnnnnnnnnnnnnnnnnnnnnnnnnnnnnnnnnnnnnnnnnnnnnnnnnnnnnnnnnnnnnnnnnnnnnnnnnnnnnnnnnnnnnnnnnnnnnnnnnnnnnnnnnnnnnnnnnnnnnnnnnnnnnnnnnnnnnnnnnnnnnnnnnnnnnnnnnnnnnnnnnnnnnnnnnnnnnnnnnnnnnnnnnnnnnnnnnnnnnnnnnnnnnnnnnnnnnnnnnnnnnnnnnnnnnnnnnnnnnnnnnnnnnnnnnnnnnnnnnnnnnnnnnnnnnnnnnnnnnnnnnnnnnnnnnnnnnnnnnnnnnnnnnnnnnnnnnnnnnnnnnnnnnnnnnnnnnnnnnnnnnnnnnnnnnnnnnnnnnnnnnnnnnnnnnnnnnnnnnnnnnnnnnnnnnnnnnnnnnnnnnnnnnnnnnnnnnnnnnnnnnnnnnnnnnnnnnnnnnnnnnnnnnnnnnnnnnnnnnnnnnnnnnnnnnnnnnnnnnnnnnnnnnnnnnnnnnnnnnnnnnnnnnnnnnnnnnnnnnnnnnnnnnnnnnnnnnnnnnnnnnnnnnnnnnnnnnnnnnnnnnnnnnnnnnnnnnnnnnnnnnnnnnnnnnnnnnnnnnnnnnnnnnnnnnnnnnnnnnnnnnnnnnnnnnnnnnnnnnnnnnnnnnnnnnnnnnnnnnnnnnnnnnnnnnnnnnnntgacggaaaaacggtggtaaggcgagtgtattttgtggcagaaaaatcttaataaattctctaactctctaaaactgacaatagtcctaaaacatgacaatctgatggacaacttaggaatcaaaacaaacaaaataaaagaaagggtgtttttttgggcgaaaaaccactgagttagtttttctgcagaaaaaccagcctggtcaatcacgtgacccagctgtatcagggatgaaaaatgacagtattcatcctagattctgacatgttgtcttattggctaatcgcttcataccgcctacgagcagttctgcccgtcataccccatcaaaatccatactcctttccacctcatttctctacaacttcattcaggcagcgttgtatagttacggagtagggagtaccagatcaagttgggtacgtacccgggccgcgcatcctatacctctttgattaacttcgttgaatcaagtgtcatacagaatctctgattgtttccgtcacttaaacagcattatacccctagagatttgcaattttatgaccaccagtcggagtcgggaatttttgctacgctggtcacgtttatattttggattaattcattcatgtctaagtacagcatcgttgaaagatttataggacgccctggggcggccgacaatcttgttggagataatgtcacattggtccttaaagactaggacaaagtaatccggggttaaagctctttcaaatgtaccaaccgtcccagaattctcatggtgaacatttggctgctgcttcacttttgaggccaacccccctaattgggataggaaaaggattttagggttacatttgggcggtcttagctagtgggtctagtggttcttagctcggcattaactgacagctcataaatgtcagatcccgttcgttcagatcccgttggtcaaaacggttagaggggctggtcctgtgggtcatttagttgcatctaaatgtggactaggtgacccgttcgtggatcatacccttacctgtctagggaaaaggtctccgttgtccctagttcttccccatgtagactaagacaatctctgagctggcttattcttctgccttgaaggaggcttttggtgttctccttaatttcccccaggtatcccacttaccattctcgtcatattcaagcttctcaacatgcaccaatcatggaacaagtggtgttaccgtcactattcccttcggcggatgatatccacagtcgccattggcgcttgtggtgtttttatctacttaatatggtttgggatgaactcagaccgtgataatgtgccccagctcctcacacaacttatcccagcaggtcactgcacctgccaatcatctacttcatttcaatgcgccgactgcctcacctgtctagcctcgccaccgctattggaaccagaacaccatgaaacttggagtttccaatacggaagagacgaccaaaacctaggcctgagccagattcagtgtcaggcagcattccccggtctcttccaggacatccagcgaggggttgcgtattggaagtcgcaagggagcatatcaagaaacgatctgagcatggtcccattccgagatggtatggcccgcgctattatctccaacggagaattgtacgtcgtggcgacaagagcaaaatgggatgatcatcggcgcaagatccttagtactctagggtctatccatcgggcactatctgcgtcctcaaatcgtacctcgcaccccacaatcgagtttatcttctcgatcgaagatcgcgtggatgacgttgatgcggccagccacccggtctgggtgttatcaagaaaagcatctgaggagtcggtcattctgatgcccgacttcggatactggtcctgggccaagagtaacatcggcccatacggacaagtcgtacagagcatcatggcggctgaatctaatatgaaattcgcggataaagaacggaagctggtctggcggggtaagttgagctttgcaccaaagctgcgtcggacgctcttggacattgcccggggtaagccttggggtgatgtgaaggagttggattggagcaagaaggtcaacttcttgtcgatggaggatcactgtcggaccatgtttatcgcgcatgttgaaggtacgtttttttttcacaacccaaatttgctatacaaggctgacagatatcgtcgatattcaggccgcgcatactcggcatcgcttaaataccgacaagcctgtcggtccgttattgtggcgcataagctgcagtacatccaacatcaccactatctcctcgtatcgtccggtccggaacagaactacgtggaagtcgagagagacttttccgatcttccgaatctcatggacgaactgttggagaacccggacaaggcagagcgtatagccaataacagtatcaaaacctttcgagaaagatacctaaccccagctgctgaggcatgctactggagagctctgtgggagggatgggctgaagtctcggcgaatgtcacacgcgacgttgaaccaccggttaataggggacttcggtatgaatcttttgtgttgctagacagtaacgatatgttcaagttcgacatgtcgaacagcttttagataacagcaaacggcttaactagttagcttcaatccagactagcttcgtcccttcacaccgacgctccattccgagccttccggtaagaccggagaatatagaacttcccctgtgggtcactagttagtaccgtgaataaacgcactattgacgtaaatatctgctttcttccgtctaaaatttttaaactatacagataggtcctaggagcgttattaaacttggtttgattgataaatacaatctccggctttatctcggttacaaaatttgtggaatctaatcatggtaaaggattacgcagatatagtataagctagagaactaggagtcccctctagtgcggttgtagtaaggctaaaatttatgattagaggatctataatggaatgccgtacaatttgtatatgaactgtcacgacctgcaatagatcgctatcatatgctttatgtacttgctcgcttactgatttcatcgtttatctcattacatagattgtttgctagattgctaagcgagaaggttcgaggtttgcaacgtttgcaaagagtcaagaattgccgtgtaaagaaaatagatttatgtggcaaaaacaaagccaaaaacatacaacagtgaggattcgctggtggtcacccacccaactactaactcaccggcgnnnnnnnnnnnnnnnnnnnnnnnnnnnnnnnnnnnnnnnnnnnnnnnnnnnnnnnnnnnnnnnnnnnnnnnnnnnnnnnnnnnnnnnnnnnnnnnnnnnnnnnnnnnnnnnnnnnnnnnnnnnnnnnnnnnnnnnnnnnnnnnnnnnnnnnnnnnnnnnnnnnnnnnnnnnnnnnnnnnnnnnnnnnnnnnnnnnnnnnnnnnnnnnnnnnnnnnnnnnnnnnnnnnnnnnnnnnnnnnnnnnnnnnnnnnnnnnnnnnnnnnnnnnnnnnnnnnnnnnnnnnnnnnnnnnnnnnnnnnnnnnnnnnnnnnnnnnnnnnnnnnnnnnnnnnnnnnnnnnnnnnnnnnnnnnnnnnnnnnnnnnnnnnnnnnnnnnnnnnnnnnnnnnnnnnnnnnnnnnnnnnnnnnnnnnnnnnnnnnnnnnnnnnnnnnnnnnnnnnnnnnnnnnnnnnnnnnnnnnnnnnnnnnnnnnnnnnnnnnnnnnnnnnnnnnnnnnnnnnnnnnnnnnnnnnnnnnnnnnnnnnnnnnnnnnnnnnnnnnnnnnnnnnnnnnnnnnnnnnnnnnnnnnnnnnnnnnnnnnnnnnnnnnnnnnnnnnnnnnnnnnnnnnnnnnnnnnnnnnnnnnnnnnnnnnnnnnnnnnnnnnnnnnnnnnnnnnnnnnnnnnnnnnnnnnnnnnnnnnnnnnnnnnnnnnnnnnnnnnnnnnnnnnnnnnnnnnnnnnnnnnnnnnnnnnnnnnnnnnnnnnnnnnnnnnnnnnnnnnnnnnnnnnnnnnnnnnnnnnnnnnnnnnnnnnnnnnnnnnnnnnnnnnnnnnnnnnnnnnnnnnnnnnnnnnnnnnnnnnnnnnnnnnnnnnnnnnnnnnnnnnnnnnnnnnnnnnnnnnnnnnnnnnnnnnnnnnnnnnnnnnnnnnnnnnnnnnnnnnnnnnnnnnnnnnnnnnnnnnnnnnnnnnnnnnnnnnnnnnnnnnnnnnnnnnnnnnnnnnnnnnnnnnnnnnnnnnnnnnnnnnnnnnnnnnnnnnnnnnnnnnnnnnnnnnnnnnnnnnnnnnnnnnnnnnnnnnnnnnnnnnnnnnnnnnnnnnnnnnnnnnnnnnnnnnnnnnnnnnnnnnnnnnnnnnnnnnnnnnnnnnnnnnnnnnnnnnnnnnnnnnnnnnnnnnnnnnnnnnnnnnnnnnnnnnnnnnnnnnnnnnnnnnnnnnnnnnnnnnnnnnnnnnnnnnnnnnnnnnnnnnnnnnnnnnnnnnnnnnnnnnnnnnnnnnnnnnnnnnnnnnnnnnnnnnnnnnnnnnnnnnnnnnnnnnnnnnnnnnnnnnnnnnnnnnnnnnnnnnnnnnnnnnnnnnnnnnnnnnnnnnnnnnnnnnnnnnnnnnnnnnnnnnnnnnnnnnnnnnnnnnnnnnnnnnnnnnnnnnnnnnnnnnnnnnnnnnnnnnnnnnnnnnnnnnnnnnnnnnnnnnnnnnnnnnnnnnnnnnnnnnnnnnnnnnnnnnnnnnnnnnnnnnnnnnnnnnnnnnnnnnnnnnnnnnnnnnnnnnnnnnnnnnnnnnnnnnnnnnnnnnnnnnnnnnnnnnnnnnnnnnnnnnnnnnnnnnnnnnnnnnnnnnnnnnnnnnnnnnnnnnnnnnnnnnnnnnnnnnnnnnnnnnnnnnnnnnnnnnnnnnnnnnnnnnnnnnnnnnnnnnnnnnnnnnnnnnnnnnnnnnnnnnnnnnnnnnnnnnnnnnnnnnnnnnnnnnnnnnnnnnnnnnnnnnnnnnnnnnnnnnnnnnnnnnnnnnnnnnnnnnnnnnnnnnnnnnnnnnnnnnnnnnnnnnnnnnnnnnnnnnnnnnnnnnnnnnnnnnnnnnnnnnnnnnnnnnnnnnnnnnnnnnnnnnnnnnnnnnnnnnnnnnnnnnnnnnnnnnnnnnnnnnnnnnnnnnnnnnnnnnnnnnnnnnnnnnnnnnnnnnnnnnnnnnnnnnnnnnnnnnnnnnnnnnnnnnnnnnnnnnnnnnnnnnnnnnnnnnnnnnnnnnnnnnnnnnnnnnnnnnnnnnnnnnnnnnnnnnnnnnnnnnnnnnnnnnnnnnnnnnnnnnnnnnnnnnnnnnnnnnnnnnnnnnnnnnnnnnnnnnnnnnnnnnnnnnnnnnnnnnnnnnnnnnnnnnnnnnnnnnnnnnnnnnnnnnnnnnnnnnnnnnnnnnnnnnnnnnnnnnnnnnnnnnnnnnnnnnnnnnnnnnnnnnnnnnnnnnnnnnnnnnnnnnnnnnnnnnnnnnnnnnnnnnnnnnnnnnnnnnnnnnnnnnnnnnnnnnnnnnnnnnnnnnnnnnnnnnnnnnnnnnnnnnnnnnnnnnnnnnnnnnnnnnnnnnnnnnnnnnnnnnnnnnnnnnnnnnnnnnnnnnnnnnnnnnnnnnnnnnnnnnnnnnnnnnnnnnnnnnnnnnnnnnnnnnnnnnnnnnnnnnnnnnnnnnnnnnnnnnnnnnnnnnnnnnnnnnnnnnnnnnnnnnnnnnnnnnnnnnnnnnnnnnnnnnnnnnnnnnnnnnnnnnnnnnnnnnnnnnnnnnnnnnnnnnnnnnnnnnnnnnnnnnnnnnnnnnnnnnnnnnnnnnnnnnnnnnnnnnnnnnnnnnnnnnnnnnnnnnnnnnnnnnnnnnnnnnnnnnnnnnnnnnnnnnnnnnnnnnnnnnnnnnnnnnnnnnnnnnnnnnnnnnnnnnnnnnnnnnnnnnnnnnnnnnnnnnnnnnnnnnnnnnnnnnnnnnnnnnnnnnnnnnnnnnnnnnnnnnnnnnnnnnnnnnnnnnnnnnnnnnnnnnnnnnnnnnnnnnnnnnnnnnnnnnnnnnnnnnnnnnnnnnnnnnnnnnnnnnnnnnnnnnnnnnnnnnnnnnnnnnnnnnnnnnnnnnnnnnnnnnnnnnnnnnnnnnnnnnnnnnnnnnnnnnnnnnnnnnnnnnnnnnnnnnnnnnnnnnnnnnnnnnnnnnnnnnnnnnnnnnnnnnnnnnnnnnnnnnnnnnnnnnnnnnnnnnnnnnnnnnnnnnnnnnnnnnnnnnnnnnnnnnnnnnnnnnnnnnnnnnnnnnnnnnnnnnnnnnnnnnnnnnnnnnnnnnnnnnnnnnnnnnnnnnnnnnnnnnnnnnnnnnnnnnnnnnnnnnnnnnnnnnnnnnnnnnnnnnnnnnnnnnnnnnnnnnnnnnnnnnnnnnnnnnnnnnnnnnnnnnnnnnnnnnnnnnnnnnnnnnnnnnnnnnnnnnnnnnnnnnnnnnnnnnnnnnnnnnnnnnnnnnnnnnnnnnnnnnnnnnnnnnnnnnnnnnnnnnnnnnnnnnnnnnnnnnnnnnnnnnnnnnnnnnnnnnnnnnnnnnnnnnnnnnnnnnnnnnnnnnnnnnnnnnnnnnnnnnnnnnnnnnnnnnnnnnnnnnnnnnnnnnnnnnnnnnnnnnnnnnnnnnnnnnnnnnnnnnnnnnnnnnnnnnnnnnnnnnnnnnnnnnnnnnnnnnnnnnnnnnnnnnnnnnnnnnnnnnnnnnnnnnnnnnnnnnnnnnnnnnnnnnnnnnnnnnnnnnnnnnnnnnnnnnnnnnnnnnnnnnnnnnnnnnnnnnnnnnnnnnnnnnnnnnnnnnnnnnnnnnnnnnnnnnnnnnnnnnnnnnnnnnnnnnnnnnnnnnnnnnnnnnnnnnnnnnnnnnnnnnnnnnnnnnnnnnnnnnnnnnnnnnnnnnnnnnnnnnnnnnnnnnnnnnnnnnnnnnnnnnnnnnnnnnnnnnnnnnnnnnnnnnnnnnnnnnnnnnnnnnnnnnnnnnnnnnnnnnnnnnnnnnnnnnnnnnnnnnnnnnnnnnnnnnnnnnnnnnnnnnnnnnnnnnnnnnnnnnnnnnnnnnnnnnnnnnnnnnnnnnnnnnnnnnnnnnnnnnnnnnnnnnnnnnnnnnnnnnnnnnnnnnnnnnnnnnnnnnnnnnnnnnnnnnnnnnnnnnnnnnnnnnnnnnnnnnnnnnnnnnnnnnnnnnnnnnnnnnnnnnnnnnnnnnnnnnnnnnnnnnnnnnnnnnnnnnnnnnnnnnnnnnnnnnnnnnnnnnnnnnnnnnnnnnnnnnnnnnnnnnnnnnnnnnnnnnnnnnnnnnnnnnnnnnnnnnnnnnnnnnnnnnnnnnnnnnnnnnnnnnnnnnnnnnnnnnnnnnnnnnnnnnnnnnnnnnnnnnnnnnnnnnnnnnnnnnnnnnnnnnnnnnnnnnnnnnnnnnnnnnnnnnnnnnnnnnnnnnnnnnnnnnnnnnnnnnnnnnnnnnnnnnnnnnnnnnnnnnnnnnnnnnnnnnnnnnnnnnnnnnnnnnnnnnnnnnnnnnnnnnnnnnnnnnnnnnnnnnnnnnnnnnnnnnnnnnnnnnnnnnnnnnnnnnnnnnnnnnnnnnnnnnnnnnnnnnnnnnnnnnnnnnnnnnnnnnnnnnnnnnnnnnnnnnnnnnnnnnnnnnnnnnnnnnnnnnnnnnnnnnnnnnnnnnnnnnnnnnnnnnnnnnnnnnnnnnnnnnnnnnnnnnnnnnnnnnnnnnnnnnnnnnnnnnnnnnnnnnnnnnnnnnnnnnnnnnnnnnnnnnnnnnnnnnnnnnnnnnnnnnnnnnnnnnnnnnnnnnnnnnnnnnnnnnnnnnnnnnnnnnnnnnnnnnnnnnnnnnnnnnnnnnnnnnnnnnnnnnnnnnnnnnnnnnnnnnnnnnnnnnnnnnnnnnnnnnnnnnnnnnnnnnnnnnnnnnnnnnnnnnnnnnnnnnnnnnnnnnnnnnnnnnnnnnnnnnnnnnnnnnnnnnnnnnnnnnnnnnnnnnnnnnnnnnnnnnnnnnnnnnnnnnnnnnnnnnnnnnnnnnnnnnnnnnnnnnnnnnnnnnnnnnnnnnnnnnnnnnnnnnnnnnnnnnnnnnnnnnnnnnnnnnnnnnnnnnnnnnnnnnnnnnnnnnnnnnnnnnnnnnnnnnnnnnnnnnnnnnnnnnnnnntggcttaagtacggctgagcggacgggaagccctattttccacaccctatggtcgtatatactattatgttctagtatgctaactatatcctattgtttaccttttgctacctattactattcttattctagtgattcaactagcttctcttttcaagtctatatcaagtgctgcggctcactaatccatagttcgtgggtttatttcatttggcaagtgaagaacaagcatctctgagtcctaccgacccattcatctccatcttcggctttcagccgcgatatatttgaaaaagccaggaggaaaagaactcggatgtgaacagcaaagatattatatgaaatatagctaactacgcatagatggaaatacctcattttttcgttcacgttcttccttctctttaaccatcttctcactctgtcacaattcagcaacagcacctatcttttctcacgttctaacctacaatcaattcctattttcattaaaccattttagccaatggctaagtaggtctctatggcttctgtagtggctaaattgtactaaccttattagtcgtctccccgagcctacttcggcagaccagggaatcccagtcctcatcccccctatctccccattctatattagaagccgaatggagccctggtggctctaggctcagtaggctcagagaattcatgagctgttgtgttcaaatcattgtaatgatcatttttcggcaatgaggttaacgtgaatataaatcactatatcaatatcgtgtaaagatatcagtcaaattgcccgcattctaaattttatatctgatattggttgattacctgctcaagatcccactaacaggacccttagcgttcctagaatcatacttggccccatgatacatggcatggtccccaggcacaataattattgctcccagagtaggaataattttcccacagggcctataattccggggaacgagaggtggtagagagtacgggcgactccaccaaagtgctagggaggtcgtgctacttcaaagtggcggaaggtaataccgaactgatcatataagagggtggtcgagttggtacagtataagccccttatattcgttcttaccctcccataaattgaggagctaaacccccaatttgctccaggcccaagtattacctcaatatctgtagatttaatatatctcattttggcgctttactgtacgaatctatgaacaggaagtaaatggttaaattgcgcggccgaagcttctccaaatcaccctcaatctgcaactattgaaatgaaaccagtctcgcttgggacaggaagtcctctagacctaagcttgctagcccttttagctcttttctttgaggacatatttgcccaattcccatacagacttaagtccgaccatgagatcctcgctatgtagccctgatcagtagcctctggtagtatttcagtattagacgtatcaccgggtgacaaagaagcgcgcgaccagctgtcagtatcagcagacacttgaggaatgatccactgttcgctacctccctcagcaggagactcttccaggacaggctcgagctcaggctctggttcaggcgattcgacgacaggctctggtacagcctcttcgaaggcaggctctggtacagcctcttcgaaggcaggctcaggctcaggctcttcgaagacaggctctggtacagccgcttcgaagataggctcaggctcaggctcttcgaagacaggctctagtacagcctcttcgaaggcaggctctggtacagcctcttcgaagacaggaaggctctggtacagcctcttcgaaggcaggctctggtacagcctcttcgaaggcaggctctggtacagcctcttcgaaggcaggctctggtacagcctcttcgaaggcaggctctggtacagcctcttcgaaggcaggctctggtacagcctcttcgaaggcaggctctggtacagcctcttcgaaggcaggctctggtacagcctcttcgaaggcaggctctggtacagcctcttcgaaggcaggctctggtacagcctcttcgaaggcaggctctggtacagcctcttcgaaggcaggctctggtacagcctcttcgaaggcaggctctggtacagcctcttcgaaggcaggctctggtacagcctcttcgaaggcaggctctggtacagcctcttcgaaggcaggctctggtacagcctcttcgaaggcaggctctggtacagcctcttcgaaggcaggctctggtacagcctcttcgaaggcaggctctggtacagcctcttcgaaggcaggctctggtacagcctcttcgaaggcaggctctggtacagcctcttcgaaggcaggctctggtacagcctcttcgaaggcaggctctggtacagcctcttcgaaggcaggctctggtacagcctcttcgaaggcaggctctggtacagcctcttcgaaggcaggctctggtacagcctcttcgaaggcaggctctggtacagcctcttcgaaggcaggctctggtacagcctcttcgaaggcaggctctggtacagcctcttcgaaggcaggctctggtacagcctcttcgaaggcaggctctggtacagcctcttcgaaggcaggctctggtacagcctcttcgaaggcaggctctggtacagcctcttcgaaggcaggctctggtacagcctcttcgaaggcaggctctggtacagcctcttcgaaggcaggctctggtacagcctcttcgaaggcaggctctggtacagcctcttcgaaggcaggctctggtacagcctcttcgaaggcaggctctggtacagcctcttcgaaggcaggctctggtacagcctcttcgaaggcaggctctggtacagcctcttcgaaggcaggctctggtacagcctcttcgaaggcaggctctggtacagcctcttcgaaggcaggctctggtacagcctcttcgaaggcaggctctggtacagcctcttcgaaggcaggctctggtacagcctcttcgaaggcaggctctggtacagcctcttcgaaggcaggctctggtacagcctcttcgaaggcaggctctggtacagcctcttcgaaggcaggctctggtacagcctcttcgaaggcaggctctggtacagcctcttcgaaggcaggctctggtacagcctcttcgaaggcaggctctggtacagcctcttcgaaggcaggctctggtacagcctcttcgaaggcaggctctggtacagcctcttcgaagataggctcaggctcaggctcttcggggacaggttcaggatcctcaggggatggccctcgaagaggggattcttctgaaatgatgccgttcagtatctttgctaatgattcccaaaagaattagttcagtctgattaccatatgttgaatatgttgaagataatttaccgtgctgatctttcatagaacataagctaatagatagcatctcgagaatcatcttcatcactgcattatcaaattgatggtcctggccgagaatattgtaaaatgcgtgtaagtcaagccctgcaacttcaggctttggtagtcgctgtaggtttcctcgaatgtaacttggaagccaggtttcatctgcaggaagtcttgaaaacatgtcccttacgacccgcagtatttcaagaataggaaggtccttatctaagtgctccatcttctgcttagtaaggatttcaaggttagttaggccccaagtccttaatatataatagactagaacgctcctcttatattctctggcgagatctgatacaccttcattaagaggcgagctgactgtctcgtagccgccggtatataagaagtgcagcacggtatacccgatatcttcattaacattaggcatgatgatagtcgatgacccaggagaggaaggggtaagctttaggtaattccgaaggaaataagcgggaatgccatattgcttgctccctataatgaaggtgacgagagggaactcgtagggccagtaaataggtcagaaaacgctagttttgacttattcgaagaactcacgatgacaaaggtcgatagtagtcaattttaggagagacctctggggtaaggagtcgcttaggctcctcattcgagttacgctgcttcgttttcttttttgccatgtttcagtcttcaacttcgccagctatcaagtgactctcataaaattttcaaggaaaggtatcaagaattaagatgagaggaagcctgactacatcttatatatgcggaggataagggataagtagggtaatgcaagtatgagttgtcctgcaaagtggtcgaaacatgccatctgtgccctgaatggcaatttagtgtcaaggattgaaatgcagcatgagtcagtagatggcttattacatatttcagctggttatcacttctgaggagttttcggtttgggaagacgaatctgcgccgctcaattctaagtgtgctggaagcaaaatgtgatatccctggtaatcctggactcctatcagttgctgtcctgtcagaaaccttccataatttggtaccgtatcaccgcttccaagacagatggtgcttctaagctgtgagcagcgaattcacgtggtgctataccatccaatggattatgtccaggacacgtgtggttttcgttagcgctaaagtttcatatagtggcgtactcaccacaatcctatgggtagctgaattatcactttacaattcacaaaacaacatcgctcttagaatcacctgcagagtctttcatctatcttttccttattcgccaatctcccattcggcaaaggacagccataccctagaggctccatgataactagacaaaaggtacacacaaggtaaggccagatcatgcaggtatgtgttggcagcccatgcagggtaggacacaagaattttactgatacaaaggcccgaggaactcagcccaaagctcattctccttggctaatataataccaccaacgaagcaaggcaataatgggttttctctggatcgcaggcatacctcgtccgaagttgacagattttgagaagatcgggaaatccattacggaagtggagcatttgtcttaaattggattgaatcgtccagctctacattgatgtccccgaatgcccgcctctttgatctccacccaaaacccctccaaaaaaaaagttgccaaagactcttggcccatttacattgctcaaaccgtgtttcgtcatcctgacaattcactcgcactacttttccgttcgctgtacattggaaacccttcaaaaagcattcaccaatttgacttgataaccggataaccgatcgaaagaacatcatgggtaaccggcaagtgagcaagtaatgaaagtcactatttacaagctctgttgctgattaagcccccgggctgtcacttggatataggagtgacaattggaagcattcagcttgttgactgacgagataatttagtttatgtctagcatatacgcataaatccaatccatcctttagtttgctaatattcgaacccgttccccgattccaaagaaaaagaaaagaaaatacaaaaagaaaagaaagacgaaaaaaaagttctaaatctgcttcccaaatggctcccccttcgtcttcccttccgtatgcggaggcagtttttcacgatacccaaactcctgctatttaatatgaactcggttgaatctttcataggtcttttcattcttattacgatccacattggctaagcatttggtaacatccttttcaattgaatccatggcgcggttcttgaaccacgcagtttgtccctcgtcgctttgtttcgtgacgggggtgtatatggctgtgtggcatacctcttctgtcccggtcatgttgtcggtcttgctcttccaggggcagcggtaggtgtagcggcagtagaggaagcctggtccgccgtgggacattgttgttcttgggtctgggttggttatggaggaaatttatactcccaagtccttcaaggagagaattttacgctatgtgaaataaagaagtataggagaagaaacagaaacaatattgagcaagttgataagaagtagaagacggtatttgagccaaggtgggaaagactggagaactatacccctcatttacttctaaaagtgaggggtaatcacaaggcggtgtttgaagcgctactcgacacgtcgctgcccaaatgagatttgttgggcagtgacgtgtcgggtataggaaacgagacatatggcagccgatagcgctcatatatcactgacgaaattcgtaccacttctccgcataaagctttaggctagactaaactattggccagcccgaccattttgagtgaggctcaaacgcggccattagtcgggtggatgccgcccgggtgagaatttagtgagcgccgcttttgagtcgcgcggcagggagtgagcaggctgagttgattatagatgggaaggtgggccaggtgagatcttccctgacgcgcgattcgcgcgaccactcgagccgagtaaccatgatcaaaattaaccttgtaataattggaccatcacatacccttcaggcattagccatcttagcacctatacatagccacaaagcaatctgtaatcaataatcttgtcacatcaaatgtgtgcctgatttgttgtttatctaagcgcgatccctacattcagccataaagtacggggagaaggctatatggcagggccatatagtgagaagcgggtctaacccgttacaagagaagagaaataggaggagaggctagctaggactatctaccatatggaggcatcacgtggaatcacgtgatcctcccaataagatctaagcgatctagggtagtgggaaatgtatacggtgtaggactccctacgtcggtcaccaactatgcggctaaaaggtaaggctacccgttctaacccgaaccgggattaataacaaatagccaactaggcttacataaggttccactgctaggaaaataactcaattaactcctactagctagctagatcttagggggaaagatgaaggtatttatgtctacctccatctgccctctgataccgcctcaaactgggataaaagagtggatcccagtttggcccctgacaacgctacacgaaataatgcagaaaagggttgcaaccttggaacaactaactgccccacttggattttctactaagcctatctaggaaataggcagcattatcattaaacaaagaaatgagtttgctactaagcctatttaggaaatgtttgcctttgtaggtagagcttcagtatttatactcttcacttctggcgtttcctctcgaaaattttcttcctctcactatcccaactcatctcttctcaactcttctcaactctcctcttcactcctggcgtttcagcttaagatttttcttcatctactcatcgtaactcaaacgcaactcaactcagcttggctcattaagctagcttaactcatctcaactcaacttgtccttcgtgtggcttgtctaagatgacaccattcaaagttgcgaagaaaagaacgccaactaaacaaagaatgaaagatgccatactcgacctccacagcaagacacaaaaactatccttcacccagctgaaggcctatattgaaaaccttacatcaatctttgaggaaggccagtttgagcgaccaacgatcgtaatctcttccctgaatatcggcgacgtccaagttttactcaagctcactcattcattggacaaccttgagttctgtaacagaactccggttgaactgtcccccgtctgcggtacgtatcccttaaggaatgttcaagtcaatgtaacacataactgatttgaccaagctgaatggatggatatgacgagagacgcgtttggcaaaagtggacccaatgaagcgttaacccggatcactctcaacaacctcctcatcttcgcccatcattttgtcacctcgcaacctagcaccacttcctcagacatgaacatgaacgacttgaacttgaatgccgaaggcctctggcgttatggccccgtcatgcataaggacaccaagcacgaccttgttgggcgccctgactatagcctgtggtacggcaatgaagaggatgtggctgtcagtgttgttgtggttgaaacgaagggagttgaatctgtgacaagcggggtctctcaaactctcggctacatgggttgcgttcacagacgtcgaaaagacctccagaagaaagatgcaactgtgtatggtgttgtgtctgatggccagtgttggtggttcttgaagattaacaatgactcggaggtgagtaaattataccatgaaatcatacatattctaacttgaatagtggtcagagtatatcattactgcccgtcacggaaattatcaggaggtggtaggaatacttgtgcatatgttccgaactgctgcgaccatgtctcccgctcagtcagagggaacatcacttcagacccactcaaaggaggcgtctgctgaatcatatatggagtttgatgaggaggcggtggaagatgacgatgaggaagaattctgattgctctgttctgtcctgtccctgttcttttctgcttcttttttttttttattcttataccctgattccctcgaacaaaagtttttttattttctccatatggattccctttgtatcctgattccgcatgatcatattcaatcggctacacgagtgttgcagaaagtagccatacccgatctctagggcctcaccgagttcttcaggtcctggccagacactaaggtcctttgaggagtcgttcgagtattgcgcttcaccgaatcttgtccttttttttccttgccccgttcgcactatgcgccgatcaaccttttaaatattggtgaggttagggcgggcagtattagggtgttcaaacttatgcaccgtcactgtatatcaatggtatatcttggcattagagtccgagaaccaattgaagagtgtaggtagtgacaccagtttcgggacgcaatataactgttctaacttctcagggattattcgtgaacatttcatggatagatacaatacagatgaagatctaatagagaaaacactgtatgtgttgatggacgcgaagagaaagagagagggggagcgtgcaggcaaactatccgggttctagttatcttatactcttggttgaagacgtattgcggaactaaggggtctaatgaatgggttttcaactctctgtatttctgtatcggctccgctggcaatttatagttaactagttagtatctagtactatccaatagaaaccatgcgatccttatagaatctcaagacgctcctggagtgctttcgggatattctgttcggagaacatattttagctggtaaagaaattcaaagaaaatcatggcagagtaagagaagcgcctcggggcttgactatttgtatttttttaggactgacattggtttggagtgagttggcccctatcacctcaagggtgagaattgtcaccccgttctcacctctctcaccccagtctcaagacttctcacccatatcacccgaactcaccctagagtgccgcttaggtgctgagggcacattgatcatcacattcgtgggagaggtagatagagtgagagatttaggttgtataaatggctgagtacaacaatgataggcagggtgagaattgggtgagcgccgctttatggtcacacgacgggggtaaaaaggtgtgctatagacagaataagaatctgggtgagaacccggtgacaatcgccctactaattgcggagcgaagcgaagcaattataaatcagaaggtcgtacgtaccccggagcgagatttatgctggaatatacataccgcctataagaatggtacaaagatgaaagaattaatcactttataattctctccgactattccgacgggtggcaaatatattcctattttttagataatgtggctagatatcgagctaacataggcttgtaggggtcgctgtccttcatgcaagcaaatattttcttgtacttttcctccgcttccagcataatgcgctcctcatcgtcaaatctgttatcatctggatccttccaataaagcgttcgatcgttattatctgcccagtcatccactacctttccatttggaataggagtagcaatgccttcaaggatcttcaatgatttggaatccctttcgcgcgatagtcgttcaagttgagcatccacatctagatcagactctaggacagacgacttgaaaccatgcggcccctctccccgtccataaacacacagagattcgagattgggaggtaaatgatcaattagattgaaggattgaggcctgatccgaccatcggggaatcgatcccggctggatcctacaccccgcgcaagatagcatagagtgtggacaccgagactgagactcttgagtttcgggaaatctttcaatgagatacaggatggtggaacttctagcttgtgagtggctagatcacgaagctcatctgcgtattgttcttcataaaatttctgttcatcctcatcgagcccttcgttctcatccagctggtaattcgtatcataaaactcttgccaattcgtacaagattccatgtcaagatccagtacctctagggtatgtcgatgaaaccaaagggactgaagtaatggcaccacgcttagtatagtaatacccccttccgggtcctttcgcccatctacggtgaaagtgaagctctttagtgtttttgacgactcaatgattcgacaaagatcatattcctgcatcaaggagtgtgtgaagctaatcttgctgtaattggcgcagtgcggtggaagtggtagtcctgcgttgttatcccacgatgctaatttgaaagtgacggactcaatagctggcagttttcgtaccacgtttaggcgatcgtagtatggatcttccacatatgtcgtgccctggtttcgagcatcatctgggtggaagttgatctccttgagattttggcagtatggaactgagccgggtgctgctttagaagctcgctggagaagtgacttgagcatgttttgagggaattctatgggatacatagatagggattcaaggttgggggcatttgcggctagcatcataataagcgcatctctgaactcgattgctttcggataagagggagacctatttcagagtaagtcatataacattaagagacgtgcatggagggaaaataattacctaaagtagagcggatcttgccaaaggatggataggatagattctctatcctggactttttctacgccggccttcttgagggcctgcttgagtctgtggatatcctccggagaaaacgatcgttgaggaacgggctcggattcgtagggaggaaagccggagcccgtttcactcccatacaagactaggcgacgaagatagcctccgagagaggggttggccaagatttcaagcagcatgttctgaccagcctgcagctgaactgtaaaactctcctgtccttctcgaccaagctgaaattcatgatatttttggcgattggagacatcgctgatactatgcagtcctcgattttggtgcgacaaggccacaacatcccccatagtagggagactgttgataattttgacgagcacttcaggaggaagattttgtaacggcattcttcgtgatgtgagacttctcctgggaaaaaaatgcgactgaaaaaagcggaacatgtgtaaatagttgtagaggaaagaaactgtcaaggaatactccgtaatgatacatggtattcatacccgaatatcaggtgaccgcatgtaagtacatactagctatgaagccttggcgctctattagggcttgcaactgaccgcatatcttttgatttattcatagtggcaatgagtttcatctagagagactgataaagtatgagcgacaagtagaaaattacggttccaggccagttcgtactaacgcacactctcatttctcaaatctccatgctttcaaaaagaaatggaacagttttaggtatcaaacaagcatcttgctccatgttataataaatttaaaattttaatagtcatcatcgatctctcaggatctttaggggttatcaacttcggcacctcgatgctttgggcatttatcgttagctcctcgatggccttgcgacaatggcgctatttgctgtggaaacgcctgcgtaggccagcggagcaaccatcaacttctgtagagcacactgttgggtcaacctggctgcggtgcggtagtagtcatgatcaaatactttccagatggcaggtggggattccgattttcctcactgcaatagttacatattattagttggtttacttagaatgttgtagtcatagaagactcggtctaaattttcaggctttgtgagtcaggacatgggcccagggggatcgacctggatcctcgaaacaagattcaagacaagattcaagatttcatcgttatattaagttagaaaatatctagggtgcacatttatggctaaatctcaaaagaagggagctctgagcctggaagcgccactagttgcggtggttgaagtagcctcagaggcagcccgagccggtgtggtggatgtcatcgagttcatcgatgcagtcggcgttgagggtgttgaatcggccattttggtgctaattgggctggttgaagatgaaacatcaacgacatcggtctttgtcgaacttgcgctcgtgctagcggagcttgcatcacttccgccatcgccgcattgaaccacagtctcccatccaccggcaaaggtttcctcccagtacgatgattggttaccaagaacaaagtagctgaagaaatatccagagccaagttgcttgtgtgcgttttggtagaacttgattgcacactcgtcgctacatgggaagtcttctctggcccaatcgtcactggcgggataagtcaagaagcagtaatcagacctgcgagaatatcaacatatgcatataccgtaaggaaaccacaatgtatcgaactcacccacttttggcacaagcttggccgtatttgtactggaaaacctcgcccactgtggcaacgggagcctcgtaaatcaaattattgccgctggcaagtccagctaggtcgccatccttgctgcacgcagcattaacattcttgatgtactgcgacaatgaactactgcatgtcgcggtgcacatagcttccaaatcggaaggttgcgggtcaaagtcaggatccatagacgccacgatcttgagtagagtttcatcgcagttgatactggcgctgtaggcgtctttgcaggcctgtgatgttgtctttgccaagtccttggttgtatagtcccaactaggaccggcagtatcgagactgaaggtagcagtcgcctgacccaaagcagcggcaaacgcgaagaggcataacatgatgctggtggggtatcgttttgttaagaattccaaagagcaataaaaacagatgaaaggtgagaaatgaggtgcgtctccggcgacagaaagaatagactccgtgcgaaagtgaactggggtgttcgcagcctataaatacccagaattttcaacacttcaacagctattagcgaacttagttaactatggagctgctattacaaaagtagatagccccaaattttcaggggcgattccgaaatttaagccgcaagacccacagcgaaaagatcggatggggccatagatgaggccaaactgatgtttttgatgtttttttgagctgtgcaggactaagaatacgtatcacttctaggatatacagtattcccaggtgtgcacggtgaagtaggtaaactcgctgtcgattcggtctcatgtcacgtaatggcggaaattaaaatctccacatcgagatgcttagttagtctcattttcttaccaatcagatgtcctcgattccatcccttcctctatcgcagcgatttgattgatcatccgaaactgcctgacagtagtgctgcagcctaggggactggcactgatcagaacagtggaaagacagcatctgggaccgggtacgtcgggtccgttaataggcagcccttgtccagctttttagaagtatcgaaatctgtccaaggaagaatatgaaacgcctttttattagagaacatgagtttccagtggctgtaaagacagagagattattgcaaggaaatgatattactataattttttattcagagttattcagagtacgttgaagagaatatgctgtctacataactatgacgaaatatataagtgaagggcgggcgcccaatccatgctgaattgattttgcttagcaaaagcccagctaggtctcatgggctgttctccagatatctttatcactcagcttcagcttacaaattaacggaggcttctcccataataagtaagaacgctgtttgtcccattccccgcttttctcatgaagtttcaagtcaaagctccaaagaacccgtgcaagaaccactcgtgactcgctatatgctagttctctcccgatgcagttccttggtcccactgagaacggctggaggatgtctcgattgtcgttgtagaaaggcgaggataggtcatctctggcatcctctagccaacgctcgggcataaacttgtctggagcataaaagttcatgggtgactgatatgcggcatattgatggaccgatactttcgtctgctaaacatcagccattgttcggtggaaagaaaacaggaatatcaattgaattacggtgcttacatttcggggcacgacgtagcccgaaatattggttggtccaggcccaagcgttatccgctgctgtccagagagcgctggtggataaattcgcaatgcctccttgagacatgcgagcatgtatggcagatttgcggtgcttgagattgtgatatgcttctcggtcttcatagcagatcttatttcacgagtgagtttttccatggcgtgtggcgttcgcagcagccagtaagtaattccagaaagtaaagtagctgtcgtctcgctgccaccaatgaccaagacattagagttcgcttctaactcctcctcggtaatctcgttgtttgaatctccgcgttgccgcagcatgctgtcaatgaaatctgtgcattctctgtcaccctgaaattggagacgtttctggatagtggctctgctaaattcgatttgtcttttccgtgcactcatcaggcttttcgaatcaacaaagagagacaatattctgaacaaaaacggataggcatcgttgaagctcacaagggacatgcctcggattgcctgaaagatggtcgatacccagtaatgatatttagaagattccaatcctccaaatggctcgccaaaggcgagatctccaagtatgtcgaaagtggtcaagttgtaccattttaccatatcggcttccggaatgggcgaggcggcaatgattctcaacttttcaatcaagagatccacatacttcgtgattatgggctcctgggattgcaggcctttcgcagaaaaggcatgtgccaaggacctgcgaagacgactatgatctgcatcgttggcgctaataatgtcggacggattactggttgaatgcagcacctttggtagttgtcgatggccatgaccatatatgtctttccatgcctgagcggtgatgaaagagacttcgtttgggccaaaacgaacgacttcaccgtatctttcgtgaaaatctcgcattttggtttccaatcgaccctgggaaagggcaataaaacgagtgataggaaaggcaacccatattttcggaccggggaggttgctaagtggatggaaatagagcgtccgaatgatatttaagaggaaaatgcagaaaaagagtatagcaaggaggaaaatggttgtcaacatgatttcgacggcttgttgccttcaggctcctggtattgttcacaataacagaagactcaagaaaagaagaatatatatttgtgtcctaaagttcgagatacaggatatatcaatatatatggataactaaggtcatctttatttcaacctctataacaaattgccatacgattgatagaaccctcttggtatgttgtgcagaacggagccgcctggcatcggatccgacgatcatcggagccgcaggaaccgcattgaccaatgaaagtacgtgactccacctatgtcttcggcttaattctcatccaagccctatatcctacagaaataaatatacaacatttctgggagtatcgcctatactctgaaatgtccactctaccgacgctcgtcttcatacctggcgcctggcataaacctacatgctacaacaaggtcatcaagctcctccaagaccagcataagttgaaatgcatctccataactctgccttcgacgacgggaaacccagctgcaaccttcaaagatgatcttgatgctgcacgtgaagctgttttgtccgagacagtccacagtcgcaatgtcgtcgtcgttgcgcactcctatggcggcatggttggcaatagtgccatcaagggtctcacgcagccagacttcaccgaaacccaaaatcaaatctcgacaacgggctatgttattggcctaattctcatagcctctggatttaccctaagtggacttgccttcatggatccgtttttcggccatccccctccatcctggcgggtcaacaatgagaccggatatgccgaacttgtcacttctccgcgtgagctcttctatcacgacttgccagcagacgaggcagaattctgggtttcgcaacttactacgcaaagcctcaaagcactgttcgagggcggggaatacacatacgccggttggagagatgtacctgtttggtatattggcaccgtcgaggaccgaggtttgccggtagtggtacaacgcataaatattggcatggcaaaggaaattggtggcagggtggagcatagggagcttcaaacgagtcattcgccctttctgagtcaaccagaaatgacggtcatgatcatgctagaggctgttgaggcgtttacggggaagctaggggtaaatcaagctacagaaaatggcctttgcgatgcgatagtagcgccgagggccatgatcacgcagcctttcacatggttcagctttggactcccgctggttattggtcatatattaggaaggtgtatacttgtatttacttgggggaggagattctggaggtctacttaggtagaatcaattaatgtatttttggtatcagctcaacggatgttcaacaaaaagttcaaggctttctgttaggttttgatatacccgttagaagtagcgatggtgacaaaatgataacaagatggaaagttcattgaatactacctcttccgacgatctattgaaaacggtccaggggatatctaccgcttgttataacgcagttcttcggcataaaagacattgtcagattaagcggaccatagaactatcagcaattggaatcattgctagcgggtattgcctacattatgcctatttaagaattgaagctgtatctaggacacctgtgcatcccccaagcctcttttaagctctcacctgtgcgggtgtcgggaggcttttgttgggctctttgaagaaggaggagtcgaaaaagttcatttctcgtatggacccatcgagcatattctctgccatagagaactttgacattatggccgatgagagttccccagggacttcgggatgatatttgagcacctgaatatccacttgtgactacgtagtcgtgtgatatgccaggaattcaccctttgactgtgccgccaagctgatttcgttcatgtctatacaaagatacctaggcactacatgtatttcctcaatcaaactcgtatttgtgaatgtaatagttatcttataaggaatgttacgcgtaccgaaagaaagaaataatctagtatgcttccatatcataaaaaaagtaaatgaacagttctaacagttctagcagtcaatagaaattaacattggaagaggaaagtactgactaccttgtgtattgtaatagtcgaccgtaatatatcaactagcatcattggtctagtggtagaattcgtcgttgccatcgacgaggcccgtgttcgattcacggatgatgcactataatttttttattttttatacaaaaataagtacacctcaccgttcgtagaagcatcctaagctggacaatatgtagctcaatgaagcgaaagctgttcaagattttacttgacagtttggtggttgggtttttggaaaacacagaccaattagatacttcccgttttagagggatggatccttattaggattagcccactgtgacagtagtgaaatcgctgtaacaatagtgctctccgacttgatatattacaataatcctcggtggattttttcgaatagagatgagcctacagaatatgagactcgaggaactctcctgatttaatgcctttctacctaagtttggacaatctgcccggcttcaagtggatgggcccaggctttctatctatctctacttaggctagcgacatcttcctgactttgacactctgcggtgcatttgaaggcgatcatgttgcctttccgagagagatcagcctcttgtggtattctcagctccccgttaagccttggtcacatatcccagccctgtggagcaacttttctcgattttgcccgcggggttcctccgtccccgggggctaggtcagtcattccctccctgagaagacttgtcctctgcggtatcaccttctgtcaagctcgaggggcttcgggtcctcggattcggagggggacagggacaatgcacggtgcaatcgattgcgaaagcgcagtcgtcgatcagcggagggaaattttggaatggcactcataattgcatgtaggtacactgagatgacaagcgaccatatggcgagcacactcagcctttatgcaaagtcggtacaggaaaccagaagtgagcgctctgccagctcgcaaccgggtgttgcaagcttcactgtcttccacctggccctgccgcaattgtcgctaaagttgaatatgtttcaaccactcaggcacacagcggtcaccaacttagtgtggcccgcccaataaatgatatgcgctagggctttggcagaagaagtctcttgtactgatcaaggcaatttcgagaatgactgtaccatccgaagcatactgacgtattttgaggagccgcctgtcaacaaagaatctgcgcgccatagtgttggcggatttgatgctttcaactattccatgctagaaaaatgacggatccgtcaaattctgaaatattgatgggtccaagtgatcaaagctgaaattgtcgtcatccaaaaaaccgaggccaacgtcgaaggctgtaggagtgcacattatttcctcatgcctccaagcctcggcatcactgtcgccgccattattgcttagatctgtcgacatgttgcccagaatggtctcacaatcattcaggctttcgagcgcagcattttccatagcctgttcgaccggtaaaccatcaagcatagcctcagctcgagccgttgctatcctcagaaacaaataccctttcacatttgtttctccttggcacatccggtcctttgcatacctaacaacccgatgagcatctttaagtaatggctcttgtcgggcgcgatttcttctcttggccagaattgaaatatccgactcatgacttttgtgcaattccaggtatatcatcaatgcaccacgtgtgatgatgtcccgaaacataccacccccattgaccagcaaccggctatagagatcataatcgaggagcgatatcaaatccagggcaacctcaagacaaactttatgtgagtgtgcatagagtgggtttcgtgtcgcctgtatcgcgtagttgaagtgaagacaaagaagaaaccgattcaggagatgactacaaaagctatatgcaaattggcttcccaacgatatatgctcctcagagagattgtgagagatctcaaccgcagctttgcgacagatcgaagccagctcatttccaaggtctaaaaccaaatgatacgagggttcttcctgtaagctgttgatgaccctggtggccctaagtctgagagagaaagaactggccaacacgcacagaagcggctgccgagtcgagctcgtagctatagtttcccggtcttcgctcactgcagaatctaggtcggcatcttctattccagatggcggcatagtgttgtaatcgctctcggtaatcatcggggccatccccgagtccaatgccgcctgaagattcatctcaaggatggtataccataatcttctccgaatctctttttgtcggaagtccatatcacccagatagttgggatcctgatgtaggcccatctgcatggccatcctcattagtgatcccgcggagacccagactaagtctgctcctattcggtttacctggcgggaaaggagtaataagcaatatatctgaatgccttttaatgtcaagcggtctttctccaacggtgcggagagccatgtttgggcaatattgatccaagaaatactcttttcggccaactcacggcgagtttcaccatgactgtgcaacggaccagcggcggaaattatgagaaggagctccacaacgaaggagctctttgcgctttccggatgatcgatatagcgttcatagtccgcctggaacgaagagcgatgaagaatgcggtagcatgactcaaatgttgcaaagtacagttgaacgagatcgtctatgacttgacgttcggggaatgagcggtgaatttcagcgggaaggctctgtctgtttgggcgctgcttcttgatttcccgggccagttctttacattttgccatcttctgcgacataagcccccggttcgcatcgatcggttgttgaaacagcgtagtctgatatgccatgactggccctagaatggacaattcggtggccttgggtgggctgtcaacaaggggccgaccatacggaacaggaagagaccatcacttaccaggcgctttgtactcatccaatggccctgtccaaaaactcgagtcttagattgggtgccatggattcggccagacggagcaggggtaggtggggagatattgctagagggggatccgtcaggtattatcgacgttctgtgttcctgctgcttggtggcttgactttcgcgcaaattatggtcggatgtgatgcgtcggttatctgtaaacgtgcatgacggggcgttatgcgcgacacactggctgcaagggttggctcggtcgcatcggaccttgcgacggcgacactcgacgcaagaatgagccgggcgccggcgttttcggatgccactttctggacttttcgttgacaattgcattttgcagatgctattggtcccacttctactggtatttttcgtgtataagttaggataagaactcgcgaactcggtgaactgcgcgtagtgaagtggctcggtgctaaatctataatccgatatctccgacgccaagacttaggtggggccctggcttagaactagccaattgtagtagatagaaggcatcggtatacagaagggtgggagatctgtagtaggggaaacagggcttacatttagaatcaggagagaaatcactcattgacattgcatatgaagatgtttcgaaagctgcataaagatgacatttgcaattctctcgctccatgcagcttcagtgatcttcacataccgactagctctaattcataccccatgtggctcgggaaacaatgtcctatcgaattgcgtagaaacaagaggtgcgctagacacaagtacttttagcttatcatgggcgagggaatgccctgtgatgctatccacttcagtgaaataatcctcggccgtaaggctagaatttaccgatgaggccgatagagccgattacgcccgccggtcgactacaatgataattactggcagggtaccttctcggttgatagcgtagaatataaataatcagctagttattttcatcagtaccagatcataagttatcttctctgatttaaccacctgcaatcttgcagccgcagcagcaaggaaatacccccccccgatgtttctccagtacgtaaatgcgtctttccctctcttttttttacaaattccttcaagggctgctgaaacagctagatgcatatggcatcctcgctcggcttcagaaaatgtaccccttcatgcaggcagtcacttacacattatcagggcgtcgaaacgcaacctgagcagtagacgcctcccagctctgcaatcaacaacaatgcccctcaacgtcctcatcgtgggtgccggcgtctgcggcccagctctcgcaattcttctccaaaggtctaattccaaacacaacatcacggtcgtcgagcgttctccctctttgcggtcgataggacagcaaattgacctgaagactcaagctcctcatatattgagaaagatgggcctcctggatgaagtcaagtcacgctgtgtgaacgagactggttttgaaatggtggattccacgggaaagcaaattgctttgtttggtgctgctgcctccggtcaacgtcgtcccgggttgacaagcgagcacgagatcatgcgtggtgatttggtgcgagtgctatatgatgccagtatcaagcaagatgcagagctaaagcatgagtcgggaaatgggaagggagtgacatatgtattcgacaaaacgatcacagccctcgacgagaccacggaaggtgtcgatgtcactttctctggtgggcagaaaaaacgatatgacctcgttgttgctgccgacggacaaggttcgcgcaccagacgtctcgcctttgggcaggaggttagcgatgcagctttcaagtccctcggcgtccacgctgcctactacagcatcccacgaattgaaggcgaaggatctctcgcaaggggccacttggctccgggaagaagaatgatgataaccagaacgagtgatcgtccagtcaccggggtgttactcttcaccatgaaagaatcgtccaggctaaaagcatcttaccagaagtcgttagaggaacagaaagaagcttttgccgagatgttcagggatgccgactggcagactgatcgattgctcactggattgaaggcttctgaggacttttatgccaatgaggttggacaaatcaagatggaacagctgtctgctggccgagtcgttctccttggagatgcgggttactgccccagtccttttacgggcttgggaaccaatctttgccttgttggggcgtatgtccttgcaggagaattggcgcggcggggcaatgacatcgctggggcactcaaatcttatgaagagaagatgcgaccctttataaatgattgtcagcgattctcatctacaaccttcggcttcttctttccatcttcgcagctcggagtttggtctatgcaaagagtgatgtgggcagtgtctaaaatcaatgacatctttccccattcccaacaagacgactattggaaaaatatcccggagtatcccgaattgaatctcgcatcttgattgtatcttccacgtcagggatatgtcgatgtatttctaatctttttgtcttcattcttactgccctgcaatatatgcactcattcatatgttgcttaaccacctgctcaagatctgccatgttgaatttggtcgcccattccctgtcaatcgtgaactgggtcattccatcctagacccgaccattgcgaaggcttcaattagaacctggttttgacgcaataaattgtaaagcattaagttcatatcttacagttacgatattgaaggcctctatggcagaaaacaggtcaatggtcgttacagagattcattccagatcagtagatctataccggtccacgttgacgatgatgaacccgcatttaggggctaaatgcattcttagccgggggttatgtgatgatccaggaaggaacgtacttgctgaactgacactcgcacttgccgcacctacactctcgctccttccacaagtagcattgggaataagcgagaagaactcgacttttgcatcttttgcaaatttgaaaaggggaggaacggccgcacagatagtttctcttttcctttcttctcctgtacttagaatttggatgaaattgcactcttttcctctggatagatctggcatgtaacagatactatctaccatctagcattgaaatgcagtttttagaattaaattatctctcttattggtagtggtagaattaatatgaatagctttatgtttaacagatcaggttatcagatcattgtactttcggagaggagattttggtttcttgaagtggtcggaggcaaagacaattttcattgactgcattcagcaggaattcattcaatgtacgattccgaggtatctgattccggtaagcaaagactggcttttattgacaaattccccgcgaatttggagcaggttcaatggctcagttgccattgggaatgcattacatcatgtcaaatactttcaaatgaccgagaatttctaacttcgaatcaggtgtggatcatcaattattgcggagcttgttgacactcagatattgacaggtaggttttgtgcggtagagtaggtatgttcgccgacttgcgtaattttctctcctggcgggatactggctctcaaatcaagagtgatataataactcaatctctagctcacgatacattaacttgctttatcgtacaggtggcccgaatgccaacgcagtaaaaggtacctaatatgcagccgataatgccatgccatccatgcattttcatcataccaagaacccggacatttacacctccatccattctttctcgttctcgtcggcaatactctcccggtatggatgtttctcaatccattcctctgcaccgacaactgtcgcagacttctcatagaactcgctaagcacctcgttcagctctataaatcattaatactcgtccaatccattcccgtgtcttgttttaagactcactttcaatttccatcgggcttgaaggttgcagtgaaaagcgagacgcgccttctctccatagtaccagcgcggacgggatgggagtacctaaaattataagctttcaaacaagattgaacatggaaaacagcatacctcgtgggacgcagataacagtggggtccaaacgacatttcccgtcggtgacttcttcctggtaccgctcaaaatcaaagcgtagcatttgctgcataagacgagagttcggcatgaagaccggcccattggagtctaataggtagatggtaagactctattgcacaagtgctagacaggagtttacagacaggggcttgacttcgcgatagtcgcgtgaaccaacccatccttagacacgctgactgcatccttcctgtggcgggtctcgtcctgggtcacatcatatagtgtggccttgcgatttagctggtatctatacatggtcgcggggaatgaagcatgggtggaaaggagggagaattttcgcgcttggttgatgttcagccgggcagctggtagccagtgagtggcgagcatggttgctagagtgtgttgcaaggtaatggatgttaagttaaaggggcgaaattcttaagtggtgtgtgtggtgtgcggttaaattaacctccagatatcgcggaaattggaccgcggatggggaaaggaacacgggtccatgacatgacgcaatacttacatatgacgtcgaggtttaagaggatctttctgcaggtgagctctacgtagcccgatatatttctataaaacatctatctgaatatctataaactctcgcatgaaaagatccgaaatattaacatgggatgcgaattgcttcacacgcttctgtagatttggaacttctagaaataacgcgccgtattgtaatgaaagtcacatgatcgggaatgcagtaatttactacgaacatccgacactcaacgattacatacttgttccaggagataattctaccatttgaatttcgatatcctccgtggaattgcttttgaactacggagtactccgcatatatctcaagtctctccacagctcattcacccataacccattcccgcacaagccgctattttatgattctcttccacttcaagtttgatacatacgaccatagggtgtggaaaacagggcttcccgtccgctcagccgtacttannnnnnnnnnnnnnnnnnnnnnnnnnnnnnnnnnnnnnnnnnnnnnnnnnnnnnnnnnnnnnnnnnnnnnnnnnnnnnnnnnnnnnnnnnnnnnnnnnnnnnnnnnnnnnnnnnnnnnnnnnnnnnnnnnnnnnnnncgccggtgagttagtagttgggtgggtgaccaccagcgaatcctcactgttgtatgtttttggctttgtttttgccacataatctattttctttacacggcgattctcaatatgcccttgacatctgagcggcactcgagggtgagcgcggggtgatgggtgagaagtctagggactagggtgagagaagcgggaatattgtgatgacgaccgtgccacaactctcaaaatgctttatagtctcctcggcgacagttttgcgcagagggtatgtactgcccatggtcgcggctgcaacgcaaaaaaagagagcaggcccttggtccctgaggcgcgcggctgtcttgtcgtgtgcaatatatatgaaaaggaacttgggcaccaagtcaagatggaatgtcgtaaccaagcgttcagcctcggcgtcacttaaaagctctcactggatcgaggccattggacgggtcactagcagcatctagcagtgcggcaatgtccgtcgagttcagttcggaatcacgagaccaacccgggtcgttggcgagcggattgggctgcccattatgtcgggtcaaatcagccagctgtgatgccagctggtcaaccttctgacaattggcactgtggagattgaatctggtaacagatcaagaggtcgtcaatacggataatattattgtagccaatggaaaaaataattctagtgcaggagaacatcacgatgtcaagttttcaattcttggatgccaacagtgtgcgttcgtgagatgatacttcaagtcatccgtgatatgaaatatggtctgatcgatatgttctttaagctagttggtcaactgcacgagatgaagcgacagggattgcccctccttctcaccacctccagccatgttctccaaattcgacatcctttgccatggtaggaaggtattcatcgtctttcggggagtctaggaccaggaaaaacatcacgaagtaggagtccttccatttcatctctggggggatacgggcagcgcttctgaaaccggagattttactatacgttattagcttgagatcataagagatatagtcgaacatacacagcacctgtcttcatatcgagtatgatctttgacggggacgccggaaccggttgatatccaacctttagaacgtccctaattctagttagcggcaagtacatgataatcaacccactgagtaacaaacatataggcctttcggaggtttgcacggacgacatctcgtttcccgcgggagagattccagaacttctgaatatcaagaggatcccctgcgaccttttcccatacaaggtagaggatatacccgccggggacaaggtcggtttcttcctgcgtgctggcatgatatccaaggagtttaggggtagtagtaaagttattcgctgtgaaatactttaaggcagatagctccacgtagtcgcgtgatttccaggcctgtgccttccgatcgtccgagctatcaagttcagtaccagataggggaacctgtttgtagatacgcatgaaggcgatatcctcggtacctgaacggcgacaaagatattttcccgcgacatatgccggatgcatgccaatgttgaaatccttctgggtaaccggaactgatgcctcactcaacttttctaatatgcgccagcggctagtgggatagagagtagcgcattgtttatccgaagggttcgggcatgctgtagtgatcaattcgttgatcatcttgggaagaactggacgagcttcgatttcaggcatcgtgagcttggaaaagagagatggtgtcaagaggctaggagaagaaatggcgatgcggcagtattatactttcacttctggggaaaagaagaagagggtagtaaacattaacccgtggactagttggtcgccatacgtcatgtgatccaaacacccgacgaggtattgtgacaccattgtgcataattggatagttgtatgggagatagagaccgagattgaaactacctataagacacatcgtgaatgcattctgcgcattaatttcaaattcacattaattcgttcaaggttaacctttttttccgtattttcccgtatttttctcatgtctacctagaagataactatacaaaaaagcacattaaaagactaccatcaagccaactgggtcatatgacaggctgcaaaagtggccgactatccttgtgttcgtgaatcaaaaagcaggaaacctaaaaccatacagcatagggcagcaagaaagaggttaagtgtagttagggccattttgaatttacgtgaaaggtactatctgcggttcatctcaaaccaaaagaggacctccagctagataaaaactagctgcagaatgcccccacgatcatatcatgtagcggataagtcattcattatagtaggtagtagggtggctgaaggcgtatgttctgggattgggtgcttcaatgtcactaatcatggtgaccatcacgccggtgaatattgataacgaggttagtactagttgttatttagttttcctcggcagataaaacagttattgttgagactgataggacctgctccctaccttgtttggtcttccttctctctctcttagcgagcacacacaatacaacacattgttctctttctcatcagttatccgggtcgtgtagcagttgtagtatctcgtctaggtgacaggggtaacctaggagccactgtttgtttgtagaatcctagaggtataatacccaatggtcaatgatatggttaatgatatgagtgttaaaggtgcctatagctactgcctgatttcccttcaacttctctttccattccgccttgctcttcttctctgactcttttaatacgccgagctcttaagcctccccttccttccattgtttccctcattcagctatctgcgcatgacgaagctttttttgcactctagattgccataatctaccattttcactttcaattttcttctcatctcagatgtgagtcttactcaagagccatttgattagtatactaataagaatccccttttagtaccatctcaacatgaaatctcccacgattacaacgcaggaggcagtcgaaagttgtctccctgaccttctcaaggctactcacaaaaccttatcatccgcaatacacaaagtcaaatatattggcccgctatctcaatggcaggacttcgaggaagatgtcaagaataacaaccccaaacgttggacctcggctgttattgattatcgtatcagcaaccgcgatcttcggcaagaggaagtctatgttgccgacgagacaggtgttcaaggaaggttccaacaggctgtaggtcaagttctcggagctgtctttagggcggaaaagaagaatctccgctttggggactttaagtctgctggcattacctacgacaaaaccccggatattgctatggtgtctcccggatccccagtcatgcttcgagctgtcggcgagctcaaagtcccctgggtcatggctcacaacctgaggaaacggtacggcgccgatcaagaactgcgtttagcacttggacaagtgctcgaatatatgattgacctacgacttccttatggatttcattctacctatgaagaaaccatctttttgaggcacgtccaggttaacggacagtggagggtcgaatactcacccgtgattcagagcacggcgactgatgtttcactaaagaagtgtttttggcacctatcatcgctggcactccaagggaatcctgttcaaaaccccgctttgaaggatgacttggtcactgacgaaattctttgatttagtcctataagccaattctgcttaatcctctttcttccttgctcctttgtctctctatgcttggtatcttattgaaatgcactctttgggaactatgagctttctctcaggatattgttgaaagtaaagttgctaaagattgaccagtaattcaagtttcacctgattttcctatgtcgttgaccctgtcaggtgccaagggacctcacaagtcttggcttttggtcggcccgtgggatccgggccgagggtggacctcaaccctggaaagccctgcatgtgtgcatacgtggggcttcggcttccttgagtcggacttcttatcgcagggcaaaggaattaaagggggattatgaagattgcgacgttcacaccgcggataagctttggccgttgcagcacgttcggaggacaaggacaagactggctatgtatacgataacgagcctcaatgtccccgtagatacctccgttcaacgaatcatttggacaagggatttggttgaagaacatccgagggtttggccccacttcctgagctaaataaggaaaggcttgatgcttcgctcgcttcccaggctgaaacattttcaaatcccagattcccacgaaattcttgtctttaacacagcaccggccaataaatctggtcccttggctactcccggcagctgcagttaccccgaggacaatgaggttcaaaggtgccgggcatatggccatagtggcgttgcgcattctactgtttacaaatcaagtcttggcgctcaacctggatgttaacaatcagcgtaagataactatgttttcatatctttctaacggttgagttgctaattacatatattttcaatgagtagaatccatcaaagatgccgggagcaccgccgcctacaacatgatgacatggtacaaagaaaatgggacagataacccgggtttcatctcaagatcttggtggacaggagctgctttgtttctagcatgtctcaattattggcatgctacaaacgacacaacctacaacgatgaagtcagcatcggattacaacatcaggggggttctggcggagactacatgccttcatgggcagtaggcatagtaagtgtctctctcaagatatgtagtcaaagtgctaaccgttgcatagggaaatgatgatcaaatgttctggggcctcgcggcgatcaccgcagcagaatataaattcccgaatcgtccaagtggggacacctggctcacccttgcagagggcgttttcaatgaccagatatcgccagaagggaagggatgggagacgactatttgtggaggtggccttcgctggcagaaggagatatggcaaagtggttataccatgaagaacgcggtgtcgaacggtggctttttcatgctcgcggctcgtctcgcttggtatacccaaaagaacaactacgccacgtgggctgcgaaagtctacgactggtctacgacggtgaatttggtcaataataaaacctgggcagtggcagatagtgtcagagcaggctctgggggtcccaatggctgcagtcttcctgaccacaccgagtggacctacaactatggtacctatatatctggtgctggctatatgtatgcctacgtaagtatttttatcccccaccctttagtaaatcagaactacactcctgtcttggcatgctaataacaaacctcgttgtagacaaacgatactaaatggcttaatatcacaaacaacctagtggattcattgtttactacatttttcctacctcaacacggaggtgtgattacagactgggagtgcgaagcttcggacgaatgctacaaagatgcgaatggtccacttttcaaaggccttactgtgtcgtggcttgcagatgttgcattgatcgtccctttcctcagggagaagatcctacccaaactccaagtttctgcccagggtgctgcaaattcatgcaccggcaacaaccaaaacctctgtggtaaccgctggtacggcgggtatgatgggcaaaattcaatggagaatgcaatgagtggtagtcagataatgagtgctgttatgctgcaatttctaggcacatcctcaaaaccagtctcgacagcaacaggaggaaacggcacaagcgacccgagtgctggtactggagaaaggtcgggacctgcaccgttgccgcctatcacaacggcagatagagcaggagcaggaatcctgacagtgcttttcgtggctcttatgttaggcggaatggtctttttgtttatggacccctgatcctcctgggatgatattctagcaactaatcaagaagcgaagcttacgggccgacttatatttcaagttctcacaataaattttttctttccgtgatctattgacgccggacagttaagaaatatcgagataaatgatcacgggatcgagtagacggcagtgagaaacttatatttcccgagaaagtatctatattctacagtctactataaaatataccaactactacatactagatatttatgtatcagttcaactggttgaattcaagcccggaggttgacgaagattatggatatattcacattcgccggtcggaagggatacaaaacttccccaaacttcttctcctcctcgaatgttgtcgtgtgaaactgcgcgatgatagttcccttgaacggcgccggtggtttcgaccataccttttccacagccatagaaacactctcgatttggataccccggaacccttctgtcgccgagcgtctcatcatttcttccgccaacatcctcataagcccacggccggaataagattggacggggttggtagcgttgcgaatcagtacctgtcctaggcctccacgatgcaggatcccgctggtctcgctcctcgaggccgtggtatagtgtttcgaacaagggtagtgttgctatcagcggctttatctgaaccatgtctagctcgtcgatgccatcgtaagccatggcaattaagactagtaggaagcccatctactctgcaaggtccctttccgttgcactttcatcatccagattccagtacagcttgccccccgtggctgcagacgcgggtcgcttgtattggtattctttgtcgaagataccaagtgacttccctgagtcaatctggtgttttattatataatacgaagtctgaaaaatgtgataggctcgctgggtcttgttctcgggatagacgaccggccacaacggggagtggaatatatttgtatgagtgcaaattgcccgggcccattcctcatgttctggttcgagaaggcgaatttcgtactgcggtgccagagatgggggcattttgatcaaattaccaagctgagaatacgtgcatcagatgtgggaaagaggggctattaatacccgggtttctagctgcagtgtaaccattgtcatttcagtacagggagctagctaggtagctacgtgttacaggtatctgatgcgtgggatagtgccccaaattgcttcccgggtaccattgacttggcctgtgtttcctatgacacagcatggactcctcgcacgttattttgacgagttggattctctgtagaaaatatgggaatcggcttttgatgcaagggattactatcgctcgctacaagaagggaccagtcctaacctcatccaaattaggaatgtagaatgtatagcgacggaaaaataaacgcctataatgcactataccttgaaaacatcatggtccttcggtggcccatcaccacatccattaatatcacatatcccatatcccatatatatctccttcactcttcctcgttcacaagttcgccctgaactctccgttccggacgcggaccagcatttcatatctgcgtctcggtactcaacacccggttgaataaaacgcagagtagaatgcaccaatgttggacaaagcagtccactctctctaggagcaaggactagcaaaagccagaacaataaagcgtaaagaaaaagtgcagaaacggcccaccaactctccggctcaggagtcaacaccagtgtcgacaataagcacccgaagcacgttcattgtgcacacctcttcgaatggaaaaaaagaacaggaaacaacacaccaaacccctccaaaattataatggcgcagccatatacccgttctcactctcgctttcactctcatttccactcaagtcccgactccgatggccagaatcagaccaccgcctcgcaccaggcaagacagcagatatactgcctgttgagtgcttttcacaggtataaccaaccaggacagtcttttcctgtacttcatgaccgcgctgtccataagcagagcatgggtcgatcgagtgctcgaaatagaggcacttgcaaacggagtagcgttcgacgactttgtaacacatttcgcgtatggtatattggatgggatttggggtgggttgaggttggatgatgactgtggttgttctgggttgtttttgagagccgaaagagaagaagaagcgaaccagccgattgaatgaatagaagaaaaatataacagaaaataaagcggacaagtatagaaagataggctggcggaagaatgacccgaaaggaaatccgagggagtgactgggttgaaagactgaggggggtatatagaggaactgggggttatatatttagcgagtatagacctgatatattcacacataatgcaataacatataaaataatataaaataacatacaaaaccatatcccgagggtcagccctatgggatgtagccccaggcagaaaccaacggggcgcgcccaatcggctaataaggaggaggaattgggaattgttactccactacgtagacaggtactggctatggacgcgggtctacctgtgtctgcataggtcgggtttagcaacgtatccattttacccctctatgctgtacatagcgggtgactatggaggatagtgggggtgcgatacacaataaaagaccagtccagtcctatcccctcagctggaatgttcacactctgactccgtaaatctcactatcgcgacacggaaatagtaaccgcagcagtcaaggatctacaagtgtggcagggaagcgaaagacggtggacacatagggaagataaccccgcgacggagtcggtgagccacaaggctgcgcagccgcataacagcgagcaaatagaattgacactggatgaggaatcagagatcgcgatatgactggctgcgtggcgtcgatcataaatccaatgtgcccaggtggacatccgggcgttttgagtcagagcctcttgacacagccaccccgtcacaggtctaggagtgtggcttaggtatagagccgccgttgaccgcatatcgatgactaggtctctatacgattagttacactctattctattacaaactgtcgcattcaaacggtgacattttgtagcgtgtagattaggcgcccgcattcagctgctgacgctaacacgaacacgaacagagttgacggagtacggagtaccgaggggaattcgcgagaaccggttttttttagctcgacgctaatcaccacggacacgttgcatgatatacctcgtgggttatccgtcagaggccgtagggctgagggcccgagcccccgagcccacttgccgttttgggtcggaggtccaggagattgtgttgttttacgtgatatcgtagattatatcgtagatacgctcatatagagaaggtactggctcaagaatcaagtcgcatggttctgatatcgtacagcgcctgtcataaagacaaagtccctgaagtagatgtgtgtgtgtgcaaatgtgctaagctaaattgatttcccggattaaaaaacacccattttcaaaactaggcctccctcttactctaactccgtaatttcagattgatcccattgcgccgtgactcaacccgcgtgctaatcccagccgaagcatctggaggatatccccgcccttggcggtctcgggaagcccggcgcgccaatcccatccgcgatcggcgctggctttgtcacctggcgtagacactaggacaccggagctgcccacggagggagggtgagatcctgagcccgagcgtgcccgcgctgactcgagcatgtcgttgccaatgaaagcaaagctggaggcggagaaattggacacggacttcttcaatagcgcgcggggggaggggggtccatctaatcctccacgcattgacgattggtactcaagtagggtggaccggaaacattcctcgcactgtgcgtagacacggggggtgacggtttccaggtcctcgattgcggacaggatggtgaactgttgggatacggacaggattgcggtgggttctggcgccagattagtatcggggaagaaggttgacggggttaacttggaagacttacggttcacaaatgcacaggcttcacccagcagagccagcagtccatccacctgcacggcggagtcacggtccgggtcgtagagacctccgtaaatattatccgccgcactcccaatgacagccgcaagagcttgtgcagcggcgcgtcgccgagccaaaggcttatagcgtggtcgctggccctcttgcagttcaaattcctcatcgcggatctcatagaaccggcgcaacgtcgcgtaaccactgaggtagaactggagaatccgagcagcttcttcatcgatttgtgcaatggatgacaggcacgctttgggttccttcatcaaagagcgcagttgttcatcgagatcggtcgtcgcagggtacgcgcgtgattgaaccagactataggaaatcaataggtcgacaactgatttgaccttgcgtcggctctgggcacgagcatagcagacgagggctagaccgaaattttcggattttgaggtcaacatgtcgccgaatcgctgtcaataagttagcagttggtcagtcaaaaggagttcccttctatcactcacctcagatacccgacgtccttgatcctccagctcaagttccgagcagagaaccactagtttatctaactgctcagggctttccaaaggaagcttatccacgatctcggtcacggcctgcttcatctggttcgcatcgtccatgcggctcaatacctcaatagccagctcccagccttcacgggaactgtgctcatcctcaataacggttcgatcatacagtccgaatgcgtaactgcgaagaatatcgtccttgcgcaaatggcgggccggagacttgttatcctgcccgtacgaaagaaccatgagatcattttcagacagcccaggaatcgtcttttggctgcttgcggactcaaaccaacctcctaggctggcaacttcggccacagctgcggccacgcaaagtgaccatgactgtaccaactctaacacgccctgcacatttccttcgaagacagatgcgagaccgacttccacgctgctgagcggattgggtcggaaatcagcggtgtcggacccatcgctggtggtgtgactgagggctagttcgaggcggtcgagataggcgccacgcatgttgcgatcaacagcgcgaacgtggttctttgggccacgcgagcgcaggaaatctgggaagttgtcgctagcgccaaaatccatgttggaaccggtgtcatcctcgccatcccaccatgctgtcaatgcaatagtcgcctccacccagtcttgagacttggccttgatggcagatgggtcgcccagaataattcggtagatagatctcaagctctggtaaattgaccatgggacacggctctctgccatgcgagccgattgagcaaatgagattgggttcttattggcagtatttgagttgaaagtggacaagccaaagttaacagcctggaagcgattctctggaaccggcataatcgattcatctcgctcctctccctcagcgaattcctccagatcagtgacagccgaaagaactcgtttccggtactgagaccaatcaagaccggtgacttcccagtcttcagcttgggttccaggacatgattcaagaatttgaagagctttgttaacgcaacgctggatgttttgcagctgtgcgccacggtagccaggctgtggaagtccatcctccattgctgatcgggcgtagttgaagtctgcggaacggagaacacctgcggcatcagtcaagcgaccacgcagcacggaagcaatgataatatcccagaagttcgaggatgcggtcgggttcggttccacatatttcaatgcttggagctccttggtctgcgatacgtggttgtcactgagccagtcaagcaaaacctgaggtagaggcttagggacgggaagtctcgtcatggctttcaccatgccaggcgccccggtgcgcatgggattgatgtgggcagtcgatgctgcttcacgagaagggtggtggatttggagcagcaatgaagccaagaaggtagcttttgcaaggtcggaagcttggtccccgggcccaataccagaatgggcaacgtatggccggtcaatcccactttcgtccgcgcaagtctgccaattatctgtcaactcctttgataccttcgccaatacagcatcgaaatcgacatgcttgaattccgcggctttgagctcgtcggaaagttttcccagggcgtcctccgttttgagaatcatctcacttggctctttaacaggggcaatgcgggatctggtagcaatattgtgaagaattgatggcatcgcggacggcttcttgggggccaggttggtcttgcggaggggagactggtgcgcccagtgctcgtcaagcttcggtcgcttggcatcgtttggattcgaatagatctgtttgcgctgcgcacccatggagggctgagacccgaaagggtttccgaaggccgagtctaagaagttgaagtttttggactgatcctgggcgttcatgttcatttccttttcaattgtctcttctgcctctggttccatcccgtcttcctgctcttcatggaagtcactcatttgcgacgatgcaaacccattggaatgtccgaaatccagcgaatccccaaatccgccgttcggcacaccgaaacgaagactagagttgcccctgagcctagcggaaggggctttggtctgcttgggcatggcataatccgtcgatccaaatgatgatccaaagatgctgtcatttgtattgatgttaccggatttggtaaagaccgagttggagaagtcatttctcgagaaggagttctggtttgtggagaatgcgccatcgtttcgggagaaggagttgatgcgcgagccaccgttgatgttggatgtagaatgaggtatgaatgagcctgcggtcgatggcggcgggccagcaggagttgtcgacaaattgctccagagactgcgagagctatctttctctggagtctcaggtggactggactcgtatggtacttggaatgacatcgcggggtcgggttgatcagaatgagaagagacgggtcgacggcatcagaggatgcaagttttgggtcacaacagctctaagaactgttagatggaacaaacgacgataacaatcgacaaaaattgattctggaggcaatgaagaaggtcggcgcagttgattgtttgtcagaggagttccctcttctcgggacttgcttgtttttttttctcgcccttcactttctgcttcgacgcgacggcggaagttatgaggcatcaaggcatctatatttagatcaggtgattttactcgaagttaggtcacgtgaggtgcttactcagaccaaagcatgccatcacgtggctgtcggtcaccaacttggggcgataacatgattggcttattgctgagctctgattaggcagggatcagcaagtcaggtacgaagccacatctgatgcatctgattttgccccgggggttcgacgagcgacacttcatgaactcaagcttgcaaagatggatcccaatcatgcttagttcgaacaagaccaagcctttaattgatcagagaatctaggtgtataattaacacgctaaactcaggttcttggaaactagtcacatttccacggagtactccgtacggtaacactctcgactttcaagtgtctcaactttcaagtgtctcaactttcgagtgtctcaactttgaagtgtctcaggcgtctccggttcatcaaatccacatttatcgtgtgtccagccgccgagtatctcagtacccacagcttctagcgccacaactacaatctcagacaaactaaacaccttcatggcgctaactgctccttcacacttggaaagccggatattactttccaccgtaccccgactccagagggcccgtcgtgggaatgtggaagttccgacccttctccttaaactgtacgatccgtcttgggaccccgaacgatccaacaaatggatcgagaatacctgcacaaacaaggcttttcggagtatatattgatcccgcatgcagttcgacgacgggaggaagctgatttttgcctggcaaccaacactcgcttggcagcgaatatgaaaactagtcgagtagaccagactatagtgacggcttttgttctagcggcatctcttccaaaacaagcagcaatttgactatctatgcaaactaaggctgcggttctacctcatggcgctcatctcgggaattagcttttttgagaaggtcagctgtgcgaaacagagctcggcgggggtggggcgggcgttgcaggtgcggagaatcaggttgttcggacaagtttgaggtttaattgacggccccgtggcgttctggatattacataattacggatttacgaaaatcccggacggttcattttagtgttatttacctattatacccttgagcaactgctatattctctcacatttgtttaatttgttttcacgatagattgtactttgtacaaagtaggccaaatcaaatgttccaaatgcccgaagccaagcgaggcagtgcaagctgagacaatgtttcagattagacaagcctttttcgatggtttgatcgacagggttcggttactaagggatatcccgaggttcctcccgatgatatcgaatcctgttgcctacccccgaagaaaccaaccctaaaaacaacccgagagacctagagcctcatttttttctttctctcaagctatggccaatccaaaaattgcatgactatggcgttccgacgaccacatcggaaatctcgccacggctgcatggaatgcaagagacgccgagtcaaggtgagaaagaaaagagaagggcaaaaaatagtatactcatcccatcacagtgcgacgaaacccggccaatatgcaccaactgcaccaagcgtcattctgaatgtgagtacgggtcgtcaacctccctactgtgggcaaatgaagaccccacggcaccatctctcgggtccgacagcggacagtctggcgacccagtacggggactccgttcatcgttgagtccaagtgcaggagcgggaacagcagactccttcggagtcctaggccagcacggcagtgaaaatgccgcgatctcagcgggatccccactgaacctcaacgacctggagctgatgatgcagtggtgcaacacgacattccggacactgtcacgcaacgagcacaccgacccaatctggcgctacatcgtacccgaagaggcgctcttacatccattcctaatgcatggcatcctggccctgtcatcgctacatctcgctcgaacagggccggagctgacccgtcgcgcgtcatatctcaaccgtgctgtcgcgcaccagaaccaggcgctggcgctgtttcgggagctactgggcgacgtgaaggagagtaatgccaaggcgatgtttgcttttgcgggaattgtggttatctacacgtttgcattcccgcatacaccagacgtgcaggatccgtggtcctgcgtcgatgatttgtaccaggttctcgttttggcgcgcggcgtgcagcaggttatttatgcgccccgggactttaccagttttctagaggacagttccttcggtccgattttacaggccgaggagactcagggttcgatccccgaggacacgactgctatgctcaaacaactgcgtgaggctaatgaagtctgcggggcgcgggataaaaatcatgacgtgcaggtttataaagggtccattgcgaatctggaggaaatgcttagttggtgctacagcgggatgagggcaagtacgattgctgggaggtgggtgatccgcttgcatcctcggttcatggagttgctacgcgaacgagaccccttcgcgctagttatgctagcgcactatggcgtgcttttacaatatttgaagcatcgttggtgctttgacgagtggtgtgtcagggtctccaaggccgtgtgggcaatattggacgatcagtggaggccgctgatccagtgggcaatgaaagagattcttggtgttaactttccgcaacaggttggcacttgacattttgaagcatttttttgttactttcatattcatattcgtatacccaagttcaaagcgccgaaaccgcgagagaaatcccaccaatccaaaagaaaaacaatttggatctccacctgaatatctccacaattatcgcaacaaatcccgattctaacccattaaacgatgcttgagccttccatggccttcaacccacttataactatcacaactcttttcatcccacgaagatgattcacctcgctagggtgaatgatcacgaaaatgacgcaagcatcaacaattcatcaatgacataaattaaaggggaaatttttatgataaaaccatgcgtgcccagagcatattctacgacatgaatgacgaatcgcatgagagaacgatactggacgagtggatgaagcttacgccggtgaccattcttcccgcacctttgggagtgagcattgagaaagtcaattgatctgaaccaatcatgaaggagagacatgaggggaataagcataccagaagcctacctcgccgcgataaatatatccagctaacccaaattagggcaagctgctccccttggccataaaaataatccgggcctattccatgtagatactagctgaacagggtggcaataggcagcgatgtgatctgcgtaatatagcatggtacctacagtatccgccgactaacgggatcaagaattgtgttctcgtgcggaacaaatgaaatgtgtgcattagagcgataattgcaaagcggactaggagggatgctaatcctgaatttctccttagatctgcaacgagcaccaagcagtccttggaaacgcaaattcgtgttaggaaaggcgaattcgtatactccgtactccggtatccacttcggataagagttaagctttgtggcgttccgtatcaggactagcgggtatccactcgtctcatatgtatcgggacagcaatccgaagccctagagggatacctagcctgcagatctcgtgtgggtacggagtaaaatgtctcaattctttcatctaggaccataacctacaacttcgcctgctcactcttattttgcagcacataccgatatctcgcctttccctcatgcatatcaactagcgcctgattaacatccaccatatccctcttctgaatccaaggtaaaacccttttcttcgcagccagagtcagcatagcccgaatatcatcaggagaaccaatattggacccagtaaccttgacactcttctggataagactccaagccataagcggcggcaacgcatcctccggcgccccaatctgcacaaaagtcccatcccgcttaagcagtctcaaatactgcgcgaagggcatatcatgcgccgacaccgtacacaagataagatcaagcgagcgcgaatatttcttcgcccaccccttctcctcacccgtagcaataaacccatcagccccaaggccaccaacagcatccgccttcttccccgacgatcgcgaaatagcaacaacacgatccgccccaagcgccctagcaaacaaaatccccagatgtcccagccccccaaccccaacaatccccaccgtcttcccaggcccaaccccatacttcctcatcggcgcgaacacagtaacacccgcacacagcaacggcgccgcctcggccgagggcagagaatccggaatccggaatacgaaatgcgcaggcccgcgccacctctctgcaaacccgccatacgacttcgacttgtcgctgtagcgtccgttgtacgtgcctgtcatgcgggcgcagtagctttcttccccgtcagcgcaggcatcgcagtctgcgcgtagacaggcgccgctctgtgcgccgacgccgacgcggtcgcccagacggatcgcgttcgggcccgattgggatgagacggcgctgccgaggcgtgtgactgtgccgattatctcgtggccgacgacgcaggggtagtcagttggaccccagcctgagcgtagagtgtggacgtcgctgccgcagatgccgcagtgggatatagaaatttcgacgtcggtgggtgtgaagggcttgggggtgtaggttgtgtatgttagggggcttttggcgtcatgggcgacccagcctttgaaggtgtcttgatctgtaggaggggacattgtttggtggtagttgcgttgtggagaggtgtcgaggtaggtgttgtgctgaattttgatacgtttgatgtatgcgaaattagagttccagaatttatgaggttgaaggaaacaagctgatgcggagaagccgaagaaaaagttaccgaggtccatcttaactccgaagtagagatacattattaaattcatatcgattgtagcgattatgcgaaagttactccatatttacatgcactcgctcaaaatgtgtacaatgcagactagtgggggtatcaattgatctttcagcgagccacgcccatcagatcttcaagctcatcagtagtgagagtactccgacgccggttcgctggcctggaagccttttcaggtcggcttctctttcgtgattcgcgctccttttgctcatttttagctgcgcgggcctcgtcttcgacggcagccagtttttggtgcacgcttagtggttcgttggctttgggctgtagggcgaatcagtgctcggggtctcattgggaatcttatgggaatatcctgggaaatagttctcgttgcatacctgctggggttcctttgtctcgatctttcgcctggttggcctgcgggtcacagtatcggctttgtaagctttgatgttgagggtatcgtcgtcggtattatccacacatggtgagccgtgtaaacctggcgtgaatgagacctttcggggacgctttgtcatggtattttcactgcgttccctcagaacgcgatcgggtcgctcgggtgctttgcgaatcttagatcccatcttcagaggattgagcctctcaggctctggtgctttctcctccgcttcgctcatatcttcctcctcagcttggtcctccaggattgtcgggataggattggactctgccaagctttgcatgctcatgtcctcggttgagttaatgctgagatcgagattcatgccgcgcttcaattcgtccgcttggacagaatctcctccatctgcaagacgtcgctgccacccacccatcatggtaactgcctgcttccaccgggattccatcttcacccagccttcccgcagtcgtttaatttcctcgtctctcacctcgacctcctcaagaggcacgaatgaggggttggtaagcagcgtttgtagatgctctagcactgcttccatgtgaccggatagttcttcacacgaggttggaagcgaagtaaccggtcctgaagaagacttctgcgctcctccgctcatcgccatacccaattgctcattctcgccattgccattgtcagtctccgtcaagccctgtagatccttcaaagtatgaacagtgttccgcgcaagctcaatcagggtatcgttctcatcactgaggtgttgacataactcggtcaagaagtcggtggtctcttgcttcaagctatatccagggtcatgtactcgttctccgccactagccagaagacgcgatcgatctgaggcagggttgatattgatcgtagtcacactcagaccctcacgcttgcctctttgtctctcagccagatgcgacttaagcttctgcatttccagatctcgcttgcgaatatcgtttgcgcattgcgctcgaacttgttggacggtactcttcatgcgctggacttgttccttgaaacttcggatgttcgcttcggcccgggacatgttggacttgagcgtgcgctcctgtgcctctgccagagctagcgagcgggtcaactcggatgtcttcgtttttagttttccctgtaggagcagcaaaggttagcgcgctatgctacagaagtagagtggagacatacgatctccgtggtctgctccgcctcgctggcttgcaacgtgcgaatagtcgcagataagctctcgcggtgttcggactcgcgctagtatttgtcagtcgcggatgaaggcgcagctcagtgcaatacacgcacgtctcgtctcaacactaaatcgttgaccaaattgatcacacgagccatggtgccgtctatccctccatcttcgtgttctgggtcagcaaaatcgatggcacgaccacctttcagcaagccccttgctagcaggatgttgttgacataggtcgaagctgcctgcaggttatgcgactccatggcagcgatcacttctattgtcgatgcagataactccgaatgccgaatggggaagaaagtaaacacgtaaatacgggaggctgtttgtgccaagtgtgcagctacttatgcggtgaggaaggaggtgtgattctgccagttcatcgtggaattgtatcgcgacgcgtcaagacttccaatttcattggatatttcctcaagtattccgataaagaggtaatccaattggacataaccatttatcgaaagtctgaagaggcagccctcaatccaggagcaattgaatgatatgctaatggtagtatcgtgccatctttattacatgacgcgtgggtataggccattgtccaatctccatgtcctatttgtcccttgcgtggcattaaactcgctcctaccccactacttaatcctcaccaaccgcctttgcatctgctcttcaacatggcttcaaggtcaggtacgcgtatggtacgcggagtaatatcaaaaaagaagcctgacatagagcaagccgctgctcttcaacgtgccggccaaaatgcatacaaagttggtgatctccaaggcgccattgagtccttcacccaggtatgccctaccttgtttgttccgtcgcgactcctactaatttatcatccatacatctaggcatgggtggcaaataacgaggatactagtatcctggataatcgtgccgccacctattgcaagctaaagcagtacagccaagcccgcgctgatgcgagagcaatggtcaagcttgcaccgaatgacgaccgtgtatctatccaccacagcgcttatttatcaactgtggattcatggctgactttgggaaaagggatacctgcgattggccaagatactatgcctagatgggaactttgacaaggcccgtgacatctacgaatatgccctccagaaacttccaaccgatcaccctggccgcaaggtatgcttttctttcttcactttttgttctactcagccctggaggtttactcctttagttatatctcattgacatcttcccccaccgtatcatgtcccactctttctttaccgttattaaccatctccaggccatcgagcagttacttagaagactgcaggataagctggcaggagggaaccggcgcgacccatttatggtcctgccactagaaatcgcagaactcacacttcagcgcttgcctttcaaacagattgtgtaagtgtacatccttacctctgaaatccactagctcattacggcatatagggcaatgctacgtgtctgcaaaggatggaaccgttttctgagcggtctagccagcttatggatgcatcttgacctcactggagctagacttcgtgtaccttggacatccgtccgaaactacatccatcgatcgcgcgcgcaactgactaatgccacgatcacaaatatcccaccctctactatgactaaggtgcttgatatgctaagcagatgcccccaattagagcacttggaggtggcggttccccatgaccagcctaaacagttttactcgaaaatccaagattttcgacatctcaagagtatcgtctgtggggcagacatcaggctttcgcatgcaagtgttgggggcattctatctaccctctcgaaacttgagagagctgcttttttgcatgtttgggatcattctaacagaggaccccagacatggccccagcatcttccaaatatgaaaagtctgactattgcatcttcacaagaaaataatcaatttttgagcttccgggatgtacttccggggttgggattggtaggcattctctgaatttaatatctgggacttccgctgacataaatcagtctgtgtatcccaatctagaggaattgcggctggtctgggatcccgcgcgatcacaatcataccggtttgatccggtgaaggaggaagaacaacttcccccgctccgcatacttgatcttcggggcgcggcggtccaacataatttctattcaatccttccaaccagccttgagactctacggttgttttcagggtccatcgaggcttctcatcttggtgggaatctgttgacaccgggagagaatgaactcccgaatctaaagaccttggtattcaatgataccccatgggtcaaccgctccaccctttccttattcctactccattcgaaggctcccctccgaactcttcacgtcaacctttgccacaacatcaaaagcgaagaactccttaatgtgctcaacgattccaacggagcgaatccagaattgaaagaattgactgacgtcggagttgcctgcatggcgggcatggacgataccagtgtcaaaagtctgtgggtaacattgccaaacctgaaaatcctcgacttgtcgcagacgagaattaccggctgtaccattcgcatgtttgcggatacctggactgaaggaccagccaccgcaaagctcgaaggcttaattataaaaggatgtgacgatgtgtctcgggatgcaattgactatggacggcaaatgggactcaagattgtcacttaggggcttggcagcgctctaaggatacttatcttagggcttttggtagacaattgtctaatgcactacccttgtaaaatgatcagaaataaccaaagatacctgcgcttgtatgaaaatgatgaatgatatgaatataaacttgctctcagaacttggaggtggagatagtgtcgagaggctaggggatcagagggcaaatgcatgggaaaataagaagagagaaacaagctggcagtcctggaaaacacatcatgtgatagcagcatacggtggcatatgtatgtacgcatgctaggtcttcaaacaaatcaaagagtgcatcaattcaaactaactaagacggagagaaagaagaagcaagtgcagaagtgggagagtgcctgcctatataactggcacttctgcaaacgtcgcaaacaacaaacgttttgaaagaataaaggaaacagcaaacgtgaggcaagcaagtaaaaaaataagcatgtgatgctatagaggatcgtaacacgcataatggccgggtaataataccaagggtacctgaaatccagaactaagaaaaccatctaaaccccacgttcctgacaccaccgctcaacctctttggccaacttctccttttgatcacgcacaagctccatcatgggctcaacctgcttcctgtgcgaggcaacaagatcctcactaccattgagagtaactacaccatccttcggcgcaagattctcgtcatagattttgaccataagctccataacagctgaaagctggtttggaagccactaaaaccccaaagcaatcagcatgatgatactcataagtcagagaaatcggacttgactcacggttacaataggactaccaccagtagcggtaggatgcggtgtgcgacgaataatatactcacgcgcgaacaaccagtgtcgccagcggaaactgcggatgtggttgagtgtgcgcaggaagaggactgcggtctcggagtcttgaatggcgtagttttggacgccgatttcttcggacttttcgcggatgtaggttaggaattcgcggtgtgggagagggcgataggcgcggaattcgtggaggattttggtgaggggtgtttcgggcatgggaatttcgcagagatgatctaggagggggatctggggttgtattagttgggttattcttttttccctctcttgggttccattggattgcttacgatgctatcatttgcaccgctctcaccgcggaagtagaggggcttgttgccttcacatccttcgtagatcacgccattcgggaacatggattggttggtgatgccgaagatgaagacgcggaaggagaggtattctgatggcttggaattgccccacatgtctatttcgatgtcagtttggaagatctggggatgtgtttcgtatggttagggttgcataccttccatggacgcttcgattttctccatcgactttaggatctcgcggaatccgtcgttgatatcctgtcgggagccatgctgctcaagattatccacaatctttaagacaccggcaatcagtgggccagtctccttgaccatgtcgacatgagtcaggatgaagcctgcttcggagctcttgggatcgagacccctctcgaaagaccgaatcagacgaaggttcgagtactcgctcagacccttggcagggtcggcaaaggtatagttgaatagagcatatgaagcagcatatgacatgaaaggtggcaggttcaggctatggataattgttagttccagtgttgtatgacgaagatatatcaaaataatccacgagatagggcagtaagaaaagaaagataagaagaaagaagacttacatctcagcacagcgatacataggacgggcaatagactggggcaatacatcgcgaccaagtccatagccacctgctgggtctttgttccagtgctcccagcaaggttcgagcaggtaagacgaagccaggaaggtatagtcacggaagaccgcagcaatagtgaagcgatcaggcgaaccatcagcgacaacgagcttctcgacctcgtcagtcaaatcagtaagctcagccttgacagcagggccgagctcataggtagccaacaggccgggcttgccatcgagcctaacgacagggaggcgattgactagagacagcagggcaccgaaggcctctggcagctcaacaggggcagtctcatagggcaagaagcctgtcttggtggtgatggtgaaggggtccagggagtgggagatggacgaagggtcatcatggatgtgagggaaccgcctcagggtagttggggaagggtagggcacttgggttcgagtcatgatgatatgagatgaaccagagaaaggagaagactagaaggctatgatatatgggtgtagtaacaaagggtgttttggggtagtatagggaagggtgtagatatataagccaaaggacaaaggagaaggcccaaagaccaagtcaagagcctaggtagtgggtgaaatgggtaaaaaaagtcggggaagaagctagaagacctcgagagatgaaaagagaattggaactttgagattttgggcgggcgaggagcagattcttataatactttgaggccggtaacaattccggcctcaagccctcattacgaaagagaatagaagatagcgtggacctggtgacatcaggtgcaacatgatgaaaattggttctatctatcctaaataacactcgagacagttcatatgagtatttttagccagaataagatattttcacatccatctcgacatccagatgaactatacaattacccagttagagagggcagaggacggtcacggggtggcgctagtcccgatacagcaggggctctaacagccggtttgactgctttacctgggatttaacggagatttgtgatgggaaattccaaataaggtgtttaaaaagtctataaaaaagatattggccattcactgatgaattactacagatgaatggccaatgttgtctacttaagtcgtgatgtatactctatagtccatggactgccaagcggagatccccatatcccgctctctgattggacgataagcccagatttaacttccctagcgttcggaggccggaatactaccggcctccgagagtagccggcctcgttatatgtgccgggttgatttgatataggacaggctcataaattagtatgataccttgtggtgattcccgagataaagcgaagattgacttataaacagctccatctctctaaaaatcttattatcttgttatttgaggaagaagtcgcacttagtatatctctaaatatattagaaacaaacaaaagaacctatcgtacatttgcatcccaaaagtaccgaaagtacttgatctattcagtgactctctagtattatatatttattgtataccacgcgattagatatgaatgatctccgttgttgataatctcacgatccgtcgttcccttctataatcttcatacaaatgcacgctcagtcctattcaccaccaaagtccaagaattgtgatagaaagtcccatgcaactgcggcaaaaaatactgcaagaccgcatcccctacaccagctggcagcgacctcttgtcaccccaatagtgcctcaccaactccccgacacatcccgtagctgcgacccctgggcacccatttgcctctgcacaagataggactcgaatgtcctccgatctgttaaattcatacctgacgtggttcccaaatgcagattgctcatgtggccattctcggccccatttagcgcagtctggatagcgcgtttcagtgggacaatcgtcccacgcctcaaagagttcatgggtgcgagggctttgctgggcaataataaatccagtgttgagaaatgtccggccgttccaatcaaggttgtgaggtgcttctggatcgagcgccatggcaaccagagtctccggagtgatctcccagtagttgaatagccattccatgggtagattggggtacggcatcatggcgtctgaatccatgaatacaacgtattcgtagtgttccaacgcttctttgatggcggtgactttgatccatgttccacttcgcccgactgctctggggatctgaactagtcggtaatcgtagccatggatcattgctatgctagtcaatcacaccgtaggaacagatagaagtgtgactacttaccgaacatgtaatggttgagtcttccactgacatccggaggaagtccagtcgcgttcaatggaaccttgctcaaaagaccttgagggccatcaagatcccgactatcggcgtccaaaatgaggatcttctttcctaatggttcggtgaaccttaatggctccgcaacccagaaggctttccctgtgcggccaataaatatggttctagtaatggggtgtatgtagggattgtatagtttgcggaccgtggaggagtataagtggctttcgacggtccataggaagtgcttcctatactagagtcagtcctcaacttcaacattttgctttgcgtgggctcgtactgggacggctgatcgattaatacactgttcaagtaggagtataccaaaagcagcgcacacacgatcagactcgaagtaaaaatagcggttattcggcgaggaaacatgagtcctgaccttggacgaggcatggggatggtacatttccggagtttccgatctgtagatttgacatagtatggatggaagtcgattgaaatgacataatttcgatgaagtaggacttatctcacccaattcatccatttgagtcctcacctcttgccgctttttgcttggagggactaagcacgcctttttctgatctggtccttattttcgtactatgccattgaacaaaaagttctccgaatatatttccagggttccgacgctgctttttctgaattctaatttttttgaccaaatttgccgtctctttagttcgcagttccatttaaacggtagaaatcgatgaaagtacagcgcagctcctaatcccttagttgtccaagcgaaggtcccatttgaatcagacataatgtctccataccccttcgtgataccgtatggtccgtatcggaaccttggaaaccgggccgaaattgcggggggtcaagtggtatatcatattcctaaggctttccgtcttttttttctcagtttcctcatgtccgcagaatcatccaaatgttgcgtcgcatgtggttggacgctcgagcagcaagaaaattgcgcttattcgagccaccttaaactcttttatggcgccggcaagcggggaacatggtcgattgggtctgatgttattttgaaagaacgccccgatgaaggtccaaaaaccgaagtgaccaccttgaagcaccttgcagcctaccccgatatcccggttccaaagatattgcgtgactgggtcgacggcaacgggcagtactttgtacttctagagcggatccaaggtcaaacgctcgaacaggcctggtcttcgttatcagatacccagaaaatagccatcgcagatgaatgtattggaattcgaaagcagttacgattagtcagcacctatagaaaatgttgatcaaactccttgttttccgggcctactgttttttgacagtgagccgcatggacctttccactctgacatcgagctttgggatgccccaagtcttactctacacgatccacctacaaggtcgttccctcaacgagccctagcaaatctgaaggaacggctgcccaaatgtgaaccctacgtcctcacccattgtgatctcaatttgggcaatattatggtgaaagacggaaggctggctgggatactcgattgggaatttgctgcatattacccaatttggtatgagtacgtttcagcctcttgggggtggacagaggaggatgcccagtggaaaaagcttttacgagagcgtatggctgtacatggcgatgaacatgaggatgcgaaggaattctggacggatttgcatcatttgagaaaatacccagatttggacgaaaaaaggccaagaagttttagaaaggttgtctgcggattaacgacaatgtataggaaaacgaaggtccggggggattaagccggcaagagaatttactaaaatcgatctagatttcaaaccatcctatccaatgagacgacctttcaaacaagctcatacaagtatacctcccacatcccatgaggatcttcaaaaaaagttatgtcatcccgatcaagccattaagatcctggagcagctgttgtaccagctccatattatctgatttctcacgcaatgccttcttgagtgcaccggctgcctccttggtatttccaggcactacctcctcagactgcagtttcttctctgcagacttgatactttccttcgcacttcgaatctgagaccaatacactgaggtcttgttgagatatccagtctcctcaagaggcaagttccacttttcaggagtcatttcgacaatatccaaccatttggccatgtgcggccatcggcgctcctccagacccgggaagtgcacgagcagatcccctcttttgccttcataggcccagtcccattcataggtattgatccacggtcgtggcagataggagactccatctgcgtaaccctgtccacttggaccccccgtcgttttgttgagcacacgtctcatgctttcttggtcagcagatcgaccaaggtcaatctgagggagataaagagggtagcccaatgtttcggtaaggaaactgatcatccagggatggacgtggaggaacataatccccgtgttgaggccgttttggtcctggcttgccactaggtggatatctttcaggtcggacggcgggaggaagatttccacggggatgtcattgttcagtataatcgagtctgcgtctacccacctgcgcgaattagcattctcaagcatatacaaagaaagaaaggacatacatcaaccactccattctctcgccggctggcttggtcaattcattgacaaccaaggatagcagatagctcggtttgttccaaaatccgatcgagatatcctgccgcaggatatgcatggggtatccccattgcttcccatggcgttcatggctttgtagcgctctttcgtacatatggttcgtctctccgtatagcatggacactttggcgaccctttgcaacttgttactgggagcattttccgactcgagaatagaaaaggaattgactgaattggctgtgacccaaacaacacatgttactgatagaattatcaggacgatgtgcaagggtcgttgtttgaatgccagttggtgtggaatcatagccgtcatcaccgcgtaggtgctaggcttgttcctcattgtgggtgtgggtgggaagatgaaaaataaatgcttccttgaggttcagccgggaccattgccagattcggaattgaatgcttgattggaggctcgtgagttgtatgaattcgtacttccggattgggaattccgttttcggtaactcaggtacaccccgtctataccgacgaataatgtccaattaatttagtttataaatagatatcgatccaatcatttgaagacaaagctcgcttattctaggacgcatggaaatgcgctgtgttgcgtacggatacttacggtccactgcccacatggtgcgtatgaagcccacaaaggtgtgccggtgtatattgatgataagaagcgatgtcgccgatctcatgagaacattcctgcgactgaccgcagcacctgatagattacataagaacatttaagcgtctaactaactagttagactacatggcaccggagtattgtagaccataatcacaacagaacgttcgattattgtcgctacagcggtgtatatattacaggccttaaggtccgttcgagattataagagaaccaagatcgcttggaaactacagcattaactacaagataccgtccagacgacgcccaaactggtagagagacgatttcatgttatatgatacagatgagggtatattatacaccacattttcaaatatttgtacaacagcgcatattcatacaactttaactccacgttcccatgcatcagcgacctggccgtcattggattcattgtatagcccgagcgcatccagtccgaatcgcagactagatcccgcaaacgaacgcagcacaatatacacagtcatatctacactatgaccctggactcgtgttctgactagttgtttttgagtcgccggtggtgctgtgtaccgtctggagcttgagatactcctgttcgagggccttttgcatttcaaagtcggcctggcgttctagtcggacacgctgcttttccatatcacgttcgactcctctgtgcatagcctagcatccaacaacgtaagtatataccagaaacagggaagagaagctgtaacataccgctctatccgcctcttgtgcccagtggacaaaccagacaatacccattgtgccgaggccagtggctgccaatgtaaactttgatgcgcgagacattgcaggatatgtgagagcacggctcgacgcagagattcggctggtaatggtcacaaacaatgttttggcctgtcagatgttcatcaaaacgattccgggattatcagatcaccgggcggcgtttggtggcagaacccccaccgctctggggggcgatgcgtggctccgatcgacctaggctcggagctacagactcgccgtttaatcgtccctgtcctgccttatttcccttctaccctatttccaaagctgagaggtttctagcaaatatggtgagcaatctgtctcagaattggtggccagctgctaacggtgaacaacagtcggctcagaactccgcgggcattcagaccctcctcgatgtaggtcttcgttgtatgttgagcgcatcgtggagatactaaccatgggactgctaggccgagagagaggcccagaagattgtgcagaaaggtaagtgtcttacccctcatcgctgcctatcacaaacactaatacgtcacgttacatttagccagagagtgtacgcaatacaaacttacctgtcgtcattcgcaccatcgaactaatgatttcgcaactctacagaccgtacccagcgtataagggatgccaagtcagaggcccagaaggagatcgaagaatacaagaagcagaaggaagaggagtacaagaagttcgagaccgaggtgagatacaattcctaaatggcggtcataacaagaggcatccacagtgctaatttgactggtctcactagcactcaagcggatacaaggtagccgaggccgaggccgacaaggaaggcgaggtcaagctccaggagatcaaggaagccggcaagaagcacggcgagaaagtggtcgcaaatctcattcgtgtgacgaccgacgtcaagcccgaggtgcctgagaatatcaaggcataatgtagatactctcggttatcttttctttcgtcgcgtgaatgcgcttgcgtgtctgttcatcgatatccaattgtcggacaatatcaatttctttttggcttaaccctgtgtatgatgtggatggattctggatcgctcgttttggaatacgcatgtcgtattcctatcccatggtgtccctgaaattttggcttgactctaggcttttcggttgacagcacgtctaggtttcaccacaacacagagagctatgcctaggcaaacagctcaccagtatactaagccatacaacacaccttgatattcgtatctgtattacgggacggcaacaagaggcgcagggtgactcaatgcgctgtccaaacgtctggacaggtatcagcactcatccctgttgaatggatccttgagcgacgagttactgctggtaacacattctggcactagtggcactgttggttttaaggagtgtctgtcccaatatcagaatagtgtataattagcgtttgagatttgtctcttaggccttgaaatgtttgattatattctgaattattccggcgcgaaaagaggcctatcctaatgaatcaagccctgaatttctagctgataacacatatctttctctttacataggtacatatataggctacgctcttggtggaagaacacactggtgaatagtattaaacagtgggaaatggcgggtgggaagccgaagtaggaagtaggtgtcgaccagaaatgaacccattagaccccctaatatcaccttggtttttgttatgcggacacttcgatccggcagatcagtaactcagtaacttcgcttaacttcagggtgagtacggtcttgtacagtcttcgaatagatcgatccttacatctctagttgatttctataaatctggcatccatacgtagctagtaaatagtgatgatttcaaattttaaatttaatcaatacaatatctctttgtagttgaaagatcattaagagtaaattaaaagtattccgatcaaacattgatctatattaattgaaccatggacgaggctgttgattttatagagagagtatctaagtactgaccaataacgtattttactaccgagtgggccaccactagcgagtaggccacccatccaaaacgcgtcgattaatttaaacccttcttcttctgtcagaatctaggatgaataccgtcatttttcatccctgatacaattgggtcacgtgactgaccaggctggttttccgcccgaaaaacatcctttcattttgttttgtttgtttgattactaagttgtccatcagattgtcatgttttccggactattgtcatttttagagagttagagaattgattgagatttttctgccacatatacattcgccttaccaccgtttttccgtcaggttcatatataggtcaatgccgttatagttatccaaccatcacttgcgtaataaggccatatccctagggctgaccgtaagagggctcaggtgatcaacaagacgtccaacgagactacattagtatatgaagagcgatatcatttaaaatagcagtgatattaggcgatttttaggatctactacgcaacacagaacaagcgcttttcgacacgcctctccactatattgacatagtatccgaacaacattggcgtcgaggccatcctattgagttttgcattccattccaagtgacagcctgtgtcgggatttaatttttccatttctacgctctggcggaacttagtgggccttgggaacgaatgagcatgctgaaccacgaatgcttttgctcgcagtgtgcagcaatcctatcccacacctggaggctctcttcccgacgcgcgcaccttcctccaaggtaaccgaattactaccttactacccaccctgtgattttgaaaccttatcccctcctacttttcttgctgtatcttcacagtttctctctctctcaatttccgcagaacctgtgacgaatcttatgtggtgatgtttgatgcctgtgttgatgcctgctgccgcaggcatcctttatgtatttagatcgtctctcattctctcacacactctctctgctgttgcggccaacctgcagaagcaaacacgacttttccgtatgttaatttgccttatttgaattaccgatacattccctcctgaacaaccccccgccccgccccttcccccctaagaccaaatccaaattccttttcaatatcctctcaaccacaaagccattctcagaaagcatctctcagagccccaccacaagaaccgccctgtatgaaaccgcgcacaacccacaccttcccgcccggcgcgaggaaccactgcatggtgcgcgcgaggttcttctgctgcgagcgaaactctccgctactatgatctgggtaaacgagcccttgtattgctgtgtgaaggagtcggtcagttcgcccttatgcgtgggggtgggcggagatcttggtgcttggtgctcggttgcagaggttgtagtccatgttgaacgctattgcgcctgagagggcgggcgaggggcggtctgttgccacgacggtggatgctttggctagggcgcagattagggaggggagagcggcgtctacattgtatcaagtgtgagcctgacgatcaaggattctggagggatttgtatactagtacgaaagatagtagtaactcatcagcgcccagctcaagcacactctcacccttgacactctacgtctcgtgaatcctctttccacgcattcgtcttaggactcatctgagtactggaatcggcatcttccacacctcggcgacaaccatcgtcgcgctgcaaagcagatgggcgaataacttccgccccacctccaacttattcagcccatctgtcttctccaacccggctgcagtctcctcggtgcgcttctaggcctggcctgggtaggttgggaccatgatttcgagatctccatagcgcggggacgagtagaggtgctgggcggtgccgctgtggaaaaagggcgcgtcatctggagggagatgtggaaggaaagcgccttgccttccaaggcacggtgggtgggagtgtcggcacacgtccgcagggacgatcatcattttagatcatctcaatcgaagctgcacttcatccattctcattctcaggtcacttgtttctctatagagcagtgtcaaaggaaaagcgagaagagtgacagccgggaaaagctcaaccgagttggcgacaatgattctgcaccccgcagggaacctggtctagcgccgagtctatcccctgttcagggctttgtgccacgactcgatgggttctagccaaaccatacggcttgcagcttaaactgtgacagattcccagaccgcgtatcgaagcaaagaccctagatcagtagtaccatcacgagctaagactgaaccagtcttaagttcctttaaacggtcaagagttttatcaatgacctcgcccatcccactcgcgtggaaaaatttcgcaagtcgatagtgatagtctaacaagaccgggtgtggaagacgggactctgactcaggctgggatgcatctacgaaagtgacctggtgggggaggaatgggttcatttcggtggggaagcgcttgaaggtgacgaagttgtacgtatgcggagcgttggcctaagtcgataattagtcctaaacgaacccttcactttccagggctagaacacagacgcacgatcggctcgaaggcacatcggaagcgaccgaatgcgcggtggatagaatggtgaagcgtgaggccattctcgatctcattgattctggaacttcgcatgattgtgcgtatctcagggaaacatcggtagagggtttcccacatattcgagatggtgcttgcacctttctgctctaattagtatgtagtcttcaacaagaaggctctaggaaaagtaccatggggtcgtagcttgcaaacgaccagggaatgatatgcgcagcttcgagatccccctgtagaacatcctccgccgaccctgtttcttccgccttgtcgaacgatatggcttttgtcaccacacaacgatctctatcacgttcgagacagcccttgcggaaatccgaatctcgcacttgcggctcctcaatcacctcatacacggcttgagcattctcacgtcttttttgatgcggtgagtcaacaggggcaggtgtttttccgccagacgctttaactatgcgaggtcagtcacatattcacgccaagtttgcatggacttactcggttggaggagacaagtgcgaatattctcataggtagccaggagcatctcgtcagattccgcatcgagaatatcgtgcgcgatagagtttcttcctcctggcggaagccagtcaagcagccccccaaagcagtcttgcagcttttcggattcctttgtgacctcgtatcgactgagtcgttcatgcgtgcgagctttaagatcattccagccatcttcggtcttctcgacctcagtctgagcgaagctaggctctgaacaaaatgtcccttgggacggagagattcgacgcggttggcgggggcgggttgaggagcggggcggtgggggtggagatgattcgtgcttgcgcttaggcattgttaggggttgcagaggacaaggatgtagtgtcaagaggtgttcgagggatagcaacactgcagttaagccttaaagactattaaatgcgttcgtgaaaagaagtcttctgcattgggccgttaggggcaagagctgtcccattggtctcaggagggcaaagcggtaaaaaagaaagcttggcagtatgacataaatagcaagcggtgtacccatatacttagaagacgggagcaatgagcagcttggagtctgattgcttctttgttttcccccacattctctgagccttctctaactagtcctcttgtattaatttaataagcgaaactcaacccgtcatagacagaatttatggcactttgatcctccgtacgcaaaacggtggttcacccctgatctcaaatctcagcaaaaggaggtaaactatacgcgacgcaaatggcaagagagctgcgcagagataaggcgactattaggcaactagatcacagtaatctttctaacgcgggttgagcaggagaattgttcacccgagccggcattgtcccattccctattttccaagcggtatacagaatatacgcccgccggtagacgatcggtagaagggcgcataaagcaatacaagggtataataaatattatgacaacgccaatcacactccatgttctatgaatacttttaccaggataagtttggatggtggtaacatcgccaatctcggtagatgagggcactgtgggtcggcttaccatcatgtcagtgtccatgcccattccttgaaagtatgaaaaacctactagtatagtggattccgagccatggccggctcatcattatcttgagtcagggagggggtttgtaattccacggtgggtgccatggcaggctcatcatcattttgagttggtaagggagtttggaattccatggttggtggacggatggtgagtggatggatgaacgaaggattgatgaatgaaggacggatgaaggaggattggagataggggcggagggtggaatataaagagaagaagggagaaggaagagggaaggaaggatggaagatggcaaacaaaaaggctcagagtacaaaatgactctatgtcacatgcgaggcttttgggatatctgttttccctttctagctactcttcttcaacatcataatccatcacattcatgcctcatcgcaatcagtatggcatccctgtcacttttcagacaaagagctaaccatgaggcattcagtcatggcattcgacgctttgactgcccctcgaccccttctgggcaaagatggagcagagcctggcttctgggctcatgctgcatacgagaacccctggccccgaggaagccgaaacagccatatgagtggctcagtactttatcaacttcaccaaaaccgtttgtatcgcgagccggctttacggccatcaaaagccaagtataatggaacacgctttttaaaggcagtgggggacaagactgtgaatgtgcaggctctgctggcacaggctaccggtccccagctgaaacctggggcagaatgtctgccttgccagaaacacagaggccctttcgtctcctgtgtcgttgtcccgggtattttcagcgaatgtgccaactgccattggtcacagcagtccgatcgatgcagcttcaacaccagccctcccatgtcatttgtccctcgacggaaggctgagcccacagtcatccccactggctttacagatacggatggggtgagaacaaaattgacggggagcttcgagaggcacgtcttgcgcgaggtaaggccatggcactttgttgaacgtctcaacaggcggattgatgagattctggaagcaaaggccgcccaggcatcacggcctgcaggtggagaggaccaagggcctggaggtcttggaaactagcatgtgaaatagtgcttgtatgaactacatttctgacacaggctcgccatccagtacacatacgtactattttctctaaagttcggtatctaggccacgctctccaggaggaatggattggcagacaatcagagtaagcataacagtattaaaacgcagaagaatgataacaccctgatgcggtcccattactccgatccccgacactctaagaggcagagctactgtatcggggacgtttgacgggcctccgacgagtgctcgccttgcttgtgcgtccagtggtcattggtgactgcgtagacgccgagtggataatttggaggaggatgcgaacgatctcctcgtcctggctgtcttccagaccccagtggaaggtcctcacggaccactttcgaatgtcagaccaatgaaacaacggttaacgtgaaggtcactttcttcttaccttgctgttcttactgatcttgtaaaagtggaactgtctgctgtcggtcacaatcccgtatacagtggtgtctttttttccgcgctcctttcgtccggagtgcacgacacctagaagctggtcagcaatgcctttggcgtggtgcaatagacttacccatataggcaaggacttgtttctgccctttgccaatttcgtccgaggtcttcgtctctacaatcaccaggttggtctccagatcctcatgctccccataccatagcgtatagtcggggcggccattcagcctgtgcttgagcttcattcggccgagtcgggtaatatgcgagaatgaggcctcgtagctccatctcaccggatgtgccgccgcaataccgacttctatggcgaagccaagaacagcgctgaacaaagggctaagctaagcgcgtacccatgcctcggtctctcgggacccagcttggcgattgtgctggtagcgcattgctcgcgctatgagaacaaattagtacagggctaatgttaggaggacagggaactcacagaggtagcgcataaattcaggaaatacgtcctggttgtttagagctgcggtatcgaacgggagtatgtcccaggaatctcccgcctttaggttcttctgggtcacctgggtgagcttaaaaattgactcaacctcttgcaaggtcaagtccttcgttgggaggttattgtccctcctagctctcgtcgtgatgtcgttaagttcggtcttcatctcgtcaacctcggacctcccaaggtttgtagcccttgaaagccatcgaatgcccgcttctgcgccattcttgacctgtatccaagcgaggtcgtcggaagttgctttcttcttcggcaccaccttcgttttcctaagggagaacttgagatgcattatgaaaagattaggggtgttaatgaggatgattgtgaggtactcttgtgtagggtagggggaaagaggacagaaatggtgggaaacagtggtgaacagtggtatagtttgtgttggcctgaggcatcacataaaactttcccgttgcgtcattccgcgccgaatctcgtttgacaacatatctgtggacgacgcagaacaatgaaatatgcaattcttacgcagaatgcactcaaacgggcttcaatagattattacttatgcggccagactgtatgtcactctaccaacaggtggtatcacgtgtctccttgcagacccagaccaagtctcgaaccgcgactagaggacctagggaaagtaattgtcgacgagtactcaatcgtccgtgataaatatagtccgttatttttggttcgaatagtgtgaataattgctgactcgtcatcagctgcaccaaaataccctgtcgttctcgcccatggcttgctcgggtttgatgaactgcaccttgctggcccatatctccccggtgttcagtactggcgtggaatcaaagaggccttgacggcgcggggtatcgaagttatcacggcgtcagtgcccccgtcaggctctattgaggaacggggtgaacaattggcccgaagcattgaggctggggctccagggaaggatgttaatatcattgcgtatgttccctccatttcctggttagagatatcgacatattctgaccctagtttttgtacagacatagcatggtgagacccctcaatcattgcgacagagttaatgcttatctgtgattaggggtgagcaataagatcatactatacagcacaagctaattaatgggctgcaaagtggtcttgatgcacgatatatgattactcacgtacgaccggagaagttcaaagtcttgtcactgaccactatcgcgtctccgcatcgaggtgtggcgcatcatagcttctcatttgcctttctgctaactgtctagcaggctcatctgtggcggactacgtatttgatcaaattggaggttcgtgactattcacccgctttctgagataactctgaagataacatctaattctgtgtagccgatcgcctaccccaaatctattatgcccttaatcgattaaatgtcgagacaggtgcattcgctcagctaacaagaaaatacatgaccgggactttcaatcctaataccccagatatggatgatgtcaggtaagtgccatgcatttccccccctatacgcactgctgacattccccagatatttctcctatggagcagcaatggagccaagtatatggtccccctttcggctttcacaccgagtacttgcggatattgagggacccaatgatggcctagttagcgtgtctagtagccgctggggaggcgatgcaggatacaaaggaacccttatgggcgtgagccatctggacctgatcaactggaccaaccggcttaagtggctagtcggggaagtaacgggcaacaaacgaaagttagttgattacaattacaagaagtattttgggaattatgctgatctttatgcaggttcaacgccattgcattttacttggacatcgcaggtatgtgttacggtttgattgggttaactgagactgataagctgattgttaattagacatgttggcaaaagagggactttgagaaagtgcccgatataattcatgtgggttcccccttagcggtgttatggctgtttcggatttgatatggaaattctggtgcctggagactcctggagactcctggaagtccctggtatgttctcattctcgcctactttgtatgtatggacatatttttgtacagtggaatcagcataatagatccgtcaattagcaacagacagttaaaataatatatttactcaaggatgcaggcaaagaagggtcatactatgtactacagatccaacggatttatagtttccgggtactagcggaatgagccctttgtctcgaaaagtgtggctgtgattgaggcgcagcatatatgcctaatccaaccttctagcctttagctattcctgcaacagttcttggtcagggcgagaccgcggcagttgtctgttgcttggcaatcagttgatctgcgaacgctcaaaacgtcattgcgggaaccttcgcatataatccgcactcgcccccatctcgcagccccacgacatttcttcaagctgttcattatttgcatatttcgagagcttgataattgtcgcattattttccacgaccgcacccccctatttgatccttcgaacgccgccaccaaccgaagatagagccccgccagggcccacgcgcccgccgccatgaccgcaaatatcgtattggacagccaccacacgcattatacaaacttggacttcctcagaggcaaggttgtactacagctaccgaccgaagcagccatcggagccattcacgtcaaattggagtgcgagagccgcactcgtctatccggtcccaagcacccccaacatgtgcactcagacaaaaagcgaacggagcttgaggttcacaaggtgagaggatatggtttatcacacctatcagtgggataaaatattgactggagcattggttaatcaacgaatgtagatcctgtacaaggttgccactgttttcccgacaccaggtgtcatgcagaatgggtcccctgcgcctgcatatacatttgctgcagggtcatatgagtaccctttcgaattcaaagtaaagagtctattctatggcaatcagaacacagttaacgccctaccagttccctttcaataattcatgcagcacgaccaacagcatgctcaccaatctaaacttttccgggttgaaagtcgaggtagctaaagacaccaatcgacacgtcaggaagactctcccgccatctttaagcgggttcccaggtgtagcagatatcaaatacttcgtcaaggccacagtcattcggccgcagttctacaaagagaacatcagatcggtaagtagtgatatgctccgatacctatgctattgtcgcactcgctaattggtttcgcagattgtgcctctgaatttccttccaattgagccaccaagagtcgggaatcccaatgaggaaacctacgccaggcggcaacatcaattctccaaaacccagggcgcgtctaagaaaaagagcatattctcacggggatcttcttcactccgagagacgtacccagagcctcctcgggtgtctgtggatgctcgacttccgaacccgtctattctcacttgcaacgaacctgtccccctccgtctcctcgttaagaagctgaccaagggaccggacgtaatctttcttcaaatgttgcaggtggaactaatatcctacacgaaaattttggcccaagacctcactcgcactgaaagcagctcgtgggttatcatgagccgcagcaatatgaatatcccgttaggcaacccggaggactccgtaggcactgattggactattgattcaaacttatggaatcggtatcccttacctaactcggtggcaccgtcctttgagacatgtaacattgaaagatcttatgagctggaaattcgagtgggcttgactcatggaatgcaggtatgttgaaccattaaccactagagttgtctcttggctgaccatggcatagcctcaactgattgttctgcccctgcgaatgccagtcaaagtattctcaggaatcgctccaccacaggccctcctagatgcgatggccgctgcatcgcttcatccatcttcctctagactgaaaccccagcccagcttgccaggagaggtaggaagcagtcgaccagtcatgccaccacgaccaaccggtgaacctgtacctgtcaattccggagatgcatacgacgacgcaccacccagttacgaggatgccatgggagaccacctgagtccagtggatggaccacgtcgcgagtatcacccaccagacgcctcatcacaaagcacagtagaatctggagctgatgccaagtccatagcccaaccgggtaaggcgcttgaggatggacccgctgcggaaggatcctcggcgcctcgtcgaggcaatcgtgcttcctcggagtccttcgacatgctacctaccacaccaccggaatctcaatctggatcgcctcccatatcccccgtgcgacgcccagcgagcatgatgaaaatttctcagaacaccgttgatgaagaaagtccgccgcaatatgagcctgtcgcggggaatcacctgaacgctccccaagctgtgcaacgccagccttcacggaataatcttcgtcctatgaacttgggcgttcccaatcggaagcctgtgccgcgaagtccaaatccttgaggttatggactcaactgtttcactaatttggtcatattctcccctctttcacgcttagtgtccgggtttgaaattaattggagcttcatggcactttgcctgtgattattccagcactcatagcattacccatcaaagaaactgcattattgctaccttcgaactcgataccccatcacgtttgtgtcttgaaaagtttttcaggttatgttcttgttcttgaaatgcatcatagcgttgtgtctaagggatctataatactagtactggtgtagcgcctgttgaatatgatagtttatttacttccacttccgaataatgagccaaataccgtccgatatcatcgtggcgcgcatcgtggcgcgcaggtcagtatggaaataagttcagatgtgcgctataccgaaaacggctagcgcaccctccacgcggattgagctttcctcttccacttgagcatatgtccaatcctatgggcatctgtcctcaaattgaatcttaatcgaaatccgctagaccagctcggactaactggattagccccccgaccgaaacattaccctcgagtattcgactcggaacctcctagcaacacgaaaaagtacattcaccgcgtcaatgatttagctcgcgactgaccatccacgatgcgtctccaccttgttatctcgcgccatggcctgccggtcacgcgcattctctggacgacgacttcgtctacttctgtgttaggcgaatatgggactcaacgcccggcatcaaccgcagctgtcgcgtcctctcgcaccccgaacatcgccttctcgaatggcgggtacacggtcgcacaactcctcgaggatgtgaacgaagttgtgccgctggaaactgaacctagtatctttgatacggagttcagtggccagtggggattggaagattatgttgtcgaggttgccggctcggaatgtctccattttatggaggttgacggcttgctccgtgacggagacgaagttgtgtatgtacatctaacaaatgttcttatatcgtaaactggactaatttctcgccttctagcatccgcgcccttcaattggcagacctacggaccagaaggctatgtggtcgccaccaaattaccgcggagggcaagcatctgatcgacggcgtgcctttcgggtcaccgttcttgaaaagaactacctctacacgacctgcaataactattcccccaagaaagaagcggcgcaccgttttctccggctgggaccacgctccagaattggtggctgaggaagtccatgctgacgaggaaggggatggagagtggcttccgcatccaaacaccgggttcggaaaggagctctctgtcatgcccgccgagcacgaagagtccctaggcacggttattcgtcaccctgttgaccatgccacggaatctgacagtgaagtggatatgtctgagatgcctgaggttgaggaagatgaactggagagcgaactccaagcactcaaagaggacttcgacgaagcttctcaatttattgatatcaggaaccagactcggaatgccagtgggcacccactacgtgctacctcgatagtcaagcgaccaacttccaaggggtcacttgcagctgcctcatctctttccagcaagcggtctcgtgcggaagacccatctcctagagcctccaaggctgtgagattcaacaagggagataagcaggaggataaggaaatgcctgatctcccacaacttccgcaggccgtacacgtacagatcgaggaaagtgctgctgcaacctctgattctggttcatccgagtcatccatgtcttcttcgggcagcgattctgacgatgattctgatgatgattccgataatgattccgatgatgattctgatgatgttgattcttcgagcgaggtcgagcctgcggcagaggcaccttctgattctcattcatcctcaagctccgatgattctgattcatcagactcagattccgaagaggaagccgccccttctatcccggtttctgtgggcgctcctggtggagggtcactacgcactaaaaaaaacaaccagcgcatcaaactacgccgccgtctatccaagctcaaggagctaggtgctcttcctgaaaaagcaggtttcgatgcattgcgagcttgggaagacagccacggaggctggcatactccggaacaatatcttaacccggagccattcgtgcaacccccaaaacctgtggaaccggaactagaaccagaaccagaacctgccgaatcttcgaaaaagaagcaaaaaagagagaagaaagaccaggagcaaaaagagttcgaagccaggcgccaaaaattgcttaacgatcttgcattgggtaatggtgtcgatgtgagcgaaatatcggaaaaggaaaatgtcccaccggctgcgtctgccgttggagacacccctgtttcagaagaaatctccggtaaggaagagccggagcaggaaccttcgaaccgacgtacactagacatagctagctcacgacgcatgctgttcggatctcttggaatgcgaaccccgaagaccaaggaagacgaagaagaaacacggagaaagcttgctgccaaagctagtgcatgcggtccccgaaacaaaccctctaagcaagacatcggagaagaggccgaccagatgcaagaggaggaagatgcatccgacattgattggcaaaacaagcttgtcattcgtgctgtcgagtgtctctatccccaggttgatatgaccgcgcctccttatccatttgttcaacgttgggataaagaagccaatgccttgattcgtgagctcaaagggcccagtaagaagcggaagagaaagcagcgtgttcaagtctatgagggacatgagcaagaagaatacgatgaaaacgggtattattacggccatgatgacaaatatcaagcgaatgaccaaccgaataacggttattacgaaggtgaagccgattcccattatgagggccaatgggaaggcgaagctgctccttactatgaaggccattatgcaggcgaagctgaaggagatcagatcgattatgacgatgctcctgagcctggacaagcacccaaccccactttggatgacctacctgcgattcctgccgacatgagttctgttcctggtttgacagaaagtgaagcaaaggtcggcgcaatcattgcattccggcagctagacatgtccaaagccacgaactggcaacctcaaatgtctgagtaccgagtagccgaggtacgctctattaaagaccatggggtgattaatgtactactggccaagcgggaccgaaagccccactcagcatccagcgagtatgacgagccccgtcgattcagcaaatttgaagtaccagacttagccaacgatgagggagaggatgatggctatcgcgagcttgcctttgcggaactcagcgatccgaagcttatccaacccgcagcgcagtcaggtgcggaatttgaaggccagaacagagaaggtagcatgtcagtgaaataaactctgattgaaggcttatgcttacatatctaaagtgtctctgtagttcatgaatccgtactgaacgcccagccaaccctttccgaggaaatgtatattgacgacacaaccattgtcaccatcggaaatgaagtcagccatattgagtcgcctcgtgaatccccgggaatgcccgatgaacctatccaacaaaccccaggcagaggcctgccgcagatccaagtccagagtggatcgattcagcgcagtgtcactcctcccatcccttcaccttcttttactggatttcactctgctcgatcctggcagcagatgacccctggtgtagagttcagccgggagcttgaaggccatactctcatcggaggggacacgccatctgctctagtcaatcgggacgaagatccttccgccttgtcatacgcttctgcaaatcaatccttcgcggatgaaaccgaggaccaggaaatgtctgagcatcaagagcatgagcgccagattgtcagtgaaaatattttaccgcctggcgattcgggggacagcggtcctcagtctggctcacttctgtctaccattgaccgtagcggtggtaatggtggtcagggtggtaatagtagtgatgatgatgcgtcggattccgattctctgtttgtgaaaagcgatacgaagagagaaaaacatagtgtggctcccaccagctcttctgaatcatggaaagatcttttgaacaggttaaggaatggtccaccagacccagacagcaacaacagcagcaacagcgaagccaacagcgaagccaacagcgaagccaacagcgaagccaacagcgaagccaacagcgaagccaacagcgaagccaacagcgaagccaacagcgaagccaacagcgaagccaacagcgaagccaacagcgaagccaacagcgaagccaacagcgaagccaacagcgaagccaacagcgaagccaacagcgaagccaacagcgaagccaacagcgaagccaacagcgaagccaacagcgaagccaacacaatagcgaagacaacaacagcgaagttagcgaaggcaatcaaagtcccgagcggctggaagatagtctgcagcactcctacctggatctcaatttctcatcgctcgatttcccacggccatccaactcacactctcccaacccgccaacgagtgcccaaccggacgcgcagtctcaaaaacaaacctcaatcctttcgccatttgagacgaagcccgccgcaactactcgctccatactctcccagcgggtgcatgaacccgaatccgcctcccaaattctctcctcccaggcatccgaagtgattgacctcacttccagcccacgtgaatcacccaaacccagcagctccgatccgaacccatcccagcgctccaaatctgcagtgtatgggaaatcacaacgtagcaaggacatccctcgctcatctggacgtccaccccgagcttctacggggagactccaacacatggtggaagtgagtattagtccttccagccagaagaagaagcgctcggcacgaaagttctgagatacggctggattatgtgtcattgaaagttgaagagatattggatgtactttcattttacacgtctgtatatttacgggcgcagagcgatggcgtctaggaacttgcacattctttctttttttttttcctggacattattttatttcggctccaatacaagatattattctgaaggtccttgcagatcatgacaaaaccctgccagtgattggttggattcatggataaggtgatgtcatggtagttgtatacttcaagctctagaggtattgtacatctcccacatcttcgaagccttgcagtcaatcaattgaactaaccaaggaactggcctaggaaagcaggttcttctttcatcttccctttttccctgcccctaaccatgtaccgtctaagtacgtggccatctatgcaactatcccggcggtgtaactttctactctcgtcattacgccatatttcctcaccccgcatatccagcttatcctggacctcttctgctgctgcttcttcttcctcgtctatcccttcaatatctaccaagtcgtcccaatttaagccaattcaatccaaacgcaatctatccacaatgccccaggaatacaaactaaaggacatctcctccttcgcatccctcaactctctagacaaggtcgaggttgaaatcgaaggcattgaggatgggaaggttctcctcgtgaagctgaacgataaagtctatgcccttagtccacggtgcacgcattacggagcaccactgaagaatggcgttgtcactgcagaagggaggattacatgtccctggcatggaggtgagatgcttgtttgagtttcttttggttaggggaaagaaaagaacaaaatactaactactatatctacagcctgctacaatgtcgcaactggcgatgttgaagatgctccagctcccaacgcgctgaacaaattcgaggtcttcgaaagagcaggcggcgtctacatccttgccaaagaagaagatgtcaaagcaggacagcgcaatccagttgtgaaatgcactgtgtcacagccaaaggagaaggttgttgtgattggagggtaagtcacccttttttccttcatcactatgcacatgtttctacatttcctctcgttcgaataattggatacccatactaacaacaaacagaggaagtggaactcttggccttatccaagctctccgcgagctaaaataccccggggcgatcacaatcatctccaaagagcccgatctgatcatagatcgaaccaagctatccaaagccctaatcacggacgcagccaaaatccaatggcgaccacgagagtggtatgctgaagccgccatagaaactatcacagatgaagtgactgccgtggacttcgaacagaaatccatctccaccaaatccggccaaaacatcccctacaccaaactagtcctagcatcaggcggcaccccacgcagactcccgctacaaggcttcaaaggcgagctcaagaacgtcttcacccttcgcaccatccaagatgtccgatcaatcctcgcagcagccggcgaagagagaagaaacatcgtggtaatcggcagctccttcatcggcatggaagtcggcaacgcgctctcaaaatcccacaatgtgacaatagtaggcatggaaacctcgccaatggagcgtgtaatgggcgcacaagtcggccgcatcttccaatcaaacctagaaaaagccggcatcaaattccacctctcagcgaacgtgagccatgctacagcctcctcctcagatccgcacaccgtcggtactgtccatctaaagaacggaacaagcctcccagccgaccttgtcattcaaggcgtgggcgtccgcccagcgacagacttccttcacgacaacaaatccataacccttgagaaagacggctccgtcaaaacaaccccccacttcgtcgtgccgggcttgcaagactccgtcttcgccgtcggcgatatagcaacatacccctaccacggccccggcgctgaccctgccggctcgccagtccgcatcgagcactgggacgtcgcgcagaacgcgggccgtgctgctgcacgagcaatcgtgcatgcgctgcgtggtccgctgtcgtccctgaaacataaggtgtttattccggtgttttggtccgcgcttggggcgcagttgcggtactgtggaaatcccattaacgggtatgacgatgttattttgcaggagaagggggaggcgaaattcgttgcgttctatacggctggagagaccgttgtggcggttgccactatgggagttgatccggttatggttaagtctgcagagctgatgagagtcgggaagatgccgagcaagggagatattgctggtggtacggatgttttgagtcttaaggtttagctaggatatgatgggatttgaagtttggatcttaatggatatgtcgggaaatagtttggaatcaagtgttttctttggtcaattggcatatacacattcgaaacaaatcggaaaataagaacaagcaaaccggaacgcccatccaggatgtagtcaacattgatgtatgatatcggtgctcatggagacatgtacacagagcgaatttattcgtccttgctcttcttcgacttggaagtggacttcttctccttcttttccttcttctccttcactttcttctccttcttttctttcttttccttcttagggctaggctccagatgcacatccacagtcgacagctcttgcactgccgacgccgccgggacgtccatcacgggaatagacccagagggcttcttcggcgatgggaagaacgacggaggcaaggactgtccctggcgctcagactcagagagtctctcctcctcctcaacagaaagcatagtcccctcaatactaaggaacccgcgatcgcgctccgaaccaggaatgacatccacatcaacaacacggaagcgcacagagccagtcacgcggtgtccagaaacagactggaagtaaccggtgtgagcagacgcatcctcctcgccctcgatcgcgatctcctcagccgaaagcgaagcaggcttgaaacattccttctcggcgtcgaagtcggccatatccccatcagaggccgagtcgtcatcggtcaaagccggcgtctcggcctcctcgccaggcggcacccacttccagttcgaaggcagacgcttgcgctcaacgccgacagagaacaagttgaacacgacagcgccgaggaatccctccgactgcacattcacccatccatcgagagtctggccgcgctttggccggaacattaggaacgtagcggtcaggtagacgtacaagacaccgtactcgtccgcggatttggcgagagtgagcggctccgggttcggatccgagaaagagcttgtattggccggcggattgctggaaatcgaggcatgggagtacgccaggacgatgcccttcagcggtgggaagtaggttaggagcagtggcgagagatgctcggccagcagcgaggccagcgcgtgcgttggcgagatggagatgggcgacaggggcaggtagagggttgctgttgtgagagtgaagggggactcgggatcggagtcttggacatgttgtggagcggcggcttttgaggatggggtttgctttcgctttttggatggtgatgtggatgcagatgcgtccttgtttttggatttgcgcttgcgctctgcgtccgctgtgcgcagcggcatgttgtcgatttccatttcgtcaattgccatcgtggaggcaatttgggcgctccacggagcttgtcgtgtcaatgtggagggattagagtgcttcttttttttttctttttggcgtcgagaactttttttttcatttggcttttggtatgacgagatgggaaggcggtgggactgggcggtgacggcacattaaatggcccccggactattttggggttggttacaatcgccaagtggcgcttagtatctattctatcaatatttttcttatttttgtttgatatggtgcaggtgaggttattcaggtgaaattgattccctcgtgatgtcgtcacttctgcctttcttcgggtgggctgttctccccaatgtgagtggagcgcgatgcggagctatacaacacgtggaataggagctaatatgaatgacagtatgctacatcgtttctacagagtgtctactatggcatcaccatacgcgccggtgaacccaagccactcccgcaaactccgcggttcgaacgtcatcgtcgccgtatcttcatcttcgtgatcaccagctacctcctctacacgctctacgagacattctaccaggtgcagcttgcaggtgattactatcaagccctcggggtatcgccatttgccgatgaacgcgcaatcaagacccgatttcgccggctcgctgctcagtatcaccccgataaagtcgggctggacagcgggtccgatgcttacttcctgtaccttcgacgcgcgcaggaaacattggtggacccggtgaagcgattcgcgtatgaccggtttggaacagacatgcttggatggggggagcagaagaccatgcgcgacttcttgatgacctcgctggtcaagtcgatcatcccgcaatatgtcgtcgggtttatcacaacgcttgtgctgaactggctgtggtgggcgaattggggccgttacgtgagtataccatattaccagcagatgttcaattccattcgctgactgttgttagtggcgcttctacacgttcgccgcaatgctgaccctcgaactcggcttgattacgcaccccaaggctgtgttcatgcctacctcataccttcccgtcgcgctacaagcatggctccctagacaatcgttctacctcctccccttccagatcctgacgctagcacgccgcgcctccatcatgctacacattttcatctcgcaggccgcaccacccaccgccaaaatggccgggaatggcaacggcgataagatatcaccgcagactgtgcagcggatcggagagttgatccagttgacgcgcggcacggatatggaggcgacgcgggcgctgcagatgggcctcgcacctttccgtggtgatcgtgaaaatgtgtcgaggctccggcggggtatgaaggaagggctgatcctcggcggggtgcggtccagtcctgaggtgcaacgtgccgtggcacaagtggttgaacgacgcaaggccgagggtgacagtaagcgcgattgatggttgaaagaggttagatgtatattacatataagctattgtattcccattgtaatccgacccgattctgaatttttgtcatttatctggacgatctcttggcggtgtcgcgtaatttggccattcttttggttccgtggactaattagcgaagttcacgtttccctggcacgtagagccgtagagccgtggtggcttgagaagactctcgtgataccctcaccagatctgttgagaatgggtccctctggactggatctccaatagatgtgagttatctgagtgaacgacgaaaaagacgcatctctcgagacatcatgcggtcagtgagttattttttctccgggatgcagcgggtgtgaaatgagatcaacggattagggttgggtttgtgtatggagatatggaatgtcgagtttctagccctgtacgagagggcaatagccggacggagagaagacgcagatatcatagacaaatccaatacaaatacaaatataagaagagaccaaaagacgaacaaaagaaacgaagctgtatatcggtatcgtacggtactgtcaccccctcgtatcacgccctccccgttggtcccgaagtggctggacgcaagttgtaatgacagtaccaggcccgatgtccacaccttcaacaccatcccctgtgcttcatggcctgaatgagttttttttttcttaaacgatgaagagggcccacgatccctttttacttcgccccttccttgtccttcttccctttccccttcccccttccccctcccatccctctttctcacagactatgcgactacacatacttcttcatctataacgggcggtagagacacataccacgtcacggtgaattgccttccgtcaattattccccttccatatccggtaccgcgcaaatcccgtttccaacacccatccatcatgcccgccgctactccaaatggtcgctcacgcggagccaagaattcacccaactccttgatggtggttctcaagctatctggggatgccctccagcagttcgccagtcccagcaagagccaaaataatactcccaacattaaatccaacgacaactcttcaccagcctcctccgccgagctccctactgtccgcccatcttctgccgataatggctccgacgccgacgccaattctacgcccgccacaggggcgactgcaggcgatgcacaacgtcggaagggagttccgggtcctaagccaggaaacaaaagaacaaaagaccaaaccgaccctaccgcaaagtcacggggacgccctggccccaagaagaaacccagactgtaagccaacccgacacattttcgaatgagcataattccagaaaagaaaatagtcgaactaacatatcatcgatcttagtgacgaaggcgaagccacaaagattccagctgcacagcgtctgggaccaaaagccaatacgggagccatcaacgccggtctgcgcgcgctagatcgcaccggagccgcgtgtcgcaaatgggagcgcaagcccctacagctccgcagcttcaccggcattttgtggcaacttccatcctggcgcacaccgggtatgcccaagtccggtgacgcggttaatggcaaggttgcagcgctggaaagtggcgacagcgacacaaagaccacgcttcatgcccccggcaccgacacggccaatggcagcagtgctgtgcctagtgagaagagcaactctggggatggcgatgtcacccctacttctcatctagtcgagccctcctcgccagccattgctatgacagcttgaatacgaccgtgacgagttcggatgtggttttcgtgctgtacttataagtttcgcgcatcttctgtgtctttctttcttcttctttacttagggttttatgtcggggttgggtttggcgttggagggaactgtttttatggctaatggcctttctgcacgaagggctctttttttccatgtgcacgggttgtagccggggatctggttatttccctcggtgtgttctgtattatagcccttttcttcttcttcttcttttttcttctgctgacatcagctatgtttacatcttctgctcgaagatcttgctctgtgggcacaacgcagttaattttgctcatgtggtctgtttatacatgatagtatagagctatatactactcccttagatctacctatgttgtatctacgtattaccgcctttcctatgctacatcttcccttgtgctcaccgagtactccatagacctgctctgatcatcatagatctgcttactgaacaagactgatccacccgtggactcactgatactcgctgagcgctctgattggttgtttcccgctgagtctgggccaggccgcagttttaggtttagcgcgcctccgtatactaagtagcatttttggctcgcaggccttgatgagctggtcgatgcaattaacgacccaacaattgctctccaagatgaggtgcgaggtgtacaatggatcttggagcatctgttcgaagaggaaaaacttccagcatcgttatacgatgaactagaatatagccgaggggtcaaatcctcggccaagtcctggacaaaaaccataagaaagattgctgttttttcatgaaggatggaaagtaatcctttgtggaaaatggtcccggaatcaaaggagcagagactggcaagtgaagacgttccaggtataacttcctagttaattttttggttatagcctttctaaactgaatacacggctacctctatacaagagctgagctcgccgtcaaagtcttggcgatatcgtgagaaatctgacacagctgcaaaagagtctagccgtggctgtctctgcatggacacatgcaccaacgagggcagtcaaagaccctgggataagaacaagaaccggctatcgatgaagatcaaggactatgttagcaaacttggtggcggctcattcttgtatcgagtgtctacttgggccgctttagctgcgatgatggcctttttcactccggtcattcacagtaggcacttggacaacgagttggggccgggtatctatacatccaattctctagaatgggtcctgaattgggttccgtcaatagtgccttgttggtcttcaaagaccctggtttccgcaatttggatatctagaggccctctcttccggagtggcagcagatcatcgtaacttggacacgaaagtcactttcgaatgcaccggattcggtacatccgaaatgaagaacagcagacatcatccaagggtatttcgaagccaggttctctaaaacaaactgtctaccacaacccagcaaggtctcatagaccgctgcatttagtcatacaggatgtggggcgctgtctgtatcattggcgatgataactagtgagcctggcccttatactatcactagcttcattatcaatcacacttttcattgtggagacgtaagctggccactcttttgctttgagtacttcctatagatggtccacattctcgctaaggacctcagccccaaggaaatcaccactgtcagcctcctttgacattttctacactgccaaagaccgacccgatgacgtcaagatcggagtcacaagtcaagcgcctcttcatgttttctcggactaggaggatggttattcgggatatttccatgcccaatcttaagcctgtctctgagattattgattcatcatattcctctcggctgtctggattggggttttgcctaaccaaattggggccgagaagttagtgatgtatttgtgatgacaaatgttatcggccagccttagctgactacatgcgaatgagttgtcagtcttacatgagatttggcgttctctttgtgtgtctctagattatatatagccaaaatccatattttctatagaagtatcgcaaaacatcttcatcatgggccaaccatcaatcccccctacccccacctcccccccggcnnnnnnnnnnnnnnnnnnnnnnnnnnnnnnnnnnnnnnnnnnnnnnnnnnnnnnnnnnnnnnnnnnnnnnnnnnnnnnnnnnnnnnnnnnnnnnnnnnnnnnnnnnnnnnnnnnnnnnnnnnnnnnnnnnnnnnnnnnnnnnnnnnnnnnnnnnnnnnnnnnnnnnnnnnnnnnnnnnnnnnnnnnnnnnnnnnnnnnnnnnnnnnnnnnnnnnnnnnnnnnnnnnnnnnnnnnnnnncccccccgcccagtgcggccggtaaaaccgccatcatcactggcggtaacactggaattggctacgaagtcgctcgtcagctcctcctcctcaaagcatcacgcgttattataaccgtccgatcaaccagcaaaggtcaggaagctgtcgcctcactacgcgcccatccggaagtgaaaaaagccaaccctaccgccacgattgaattcttccatctcgatcttgacgattttcaatccggcgtggagtttgcaaaaaagatccgcgccgaggtctctgaactacatattcttatctgcaacggtggtgtcaatctgatcagctacgaagctagcaagagtggtcatgaacgtgttatgcaggtcaactgctacactcatttcctagttacattagaactccttcctcttcttcgtgcgacggcagtgagctgtggcgaaccatcacgtctcacgttcgtcgggtcgagtatccaaaacttcaacacactggcgaaaaagcctctaacagattccaagactgtgatcgaacactacgatgacagacagatatacagcgggctaaatcggtacgcggatagtaaattagccgtgcatgcgttcgtgcagcgactagcgaacatcgtgccgtcttcagagcttatcatcaacgatctatgtcctggcatggtagctaccaacttcgaccgtggactgccgctctggttgaagcctgttatggccgtgttgaggaggctgattgcgagaacggtcgatgacggggcaaggacggttatctatgcggctgttgttgccgggcaggagacccatggaaagtttttgcagagtaacaaggtggatccgtgagtgcttccccctgcagtgaatactcgagcatgctaatgattactctagaggcgcacccatccttcaggagaaggtcggacagacctttagcgagagattgtggaaggacattatcacggaggctagcaagtatgacgccgagttgcagagctttgcttgatttataccacggaaattgttggacgtctctgttattatgttctgttctctatcagttactatggcttcgtgtgggataggccacagcatttatacacatctacgatgaagcatttcgatattatatacacaaaatgcataccagctccgccgtataatacggtaggacagttgtaaaggtcttgagtagtcagactatatcatcaactaacaaaacccactcaagaaatctactagaatatcaagcaccctcgcgtgaatctaatccgcaagccccttgcccaaataatccaacagattggtccgatgtgtttaatatagactagacatgcatcaaaaaaacggagctgcattagaggatggagtaccgtactaggcaagtatgaccagatcggttttaggacctacgctacaatctcttgccctgtcctggatatgatccgtcttgctcttcctcggttgctcggatgaatcgttggttcatacctatacgacattatgagcaatatatatctgagagttactcctttccttcatttacacaaatcatatagtaaaaccatttacttatcacctcatcaccatgaaccgcatcgacgtgcaccaccacttcatccccccggcctatgtcaacggtatcttaccttcccggaaacataataaacataattaacaagactatagccttcaactcaacttctggtgacccctccggctggcacctccccaaatggaccccagaatcgaccctctccttgatgacctcccattccacccgcgcggccattctctccctgaccgcaccgggcacctctatcctatccgattcccctatagactcagcggccctcgcccggcaaataaacctctatggttgccaacttcaccgggaaaaccccactcggttcggtttctttgctagcctgccgcatctgacacctgaaaccatcccatcggccattgaggaagtcgcttatgctctggacacactccaggctgatggtatcactctgtacactcggtatagtggaactggatatctcggtaatgctgcttttgcgccactctgggaggaattgaaccgccgaaaggcagtagtttttatccatccgacaaacatcgcttcggacgctcaggaccagcctcagatgggcattgcaaagctgccacagccgattattgattatcctcacgagacatgccgaaccgcggtcgacctgattacctctggaactatttcgaagaaccccgatgtcaagatcattctgtcccacggaggcggaacactgcctgttcttgctactcgggcggcaaatctattgtacgatgcgggtctgaccgagatcaccccagagatattcatggagcaggctaggggtttttatcttgatcttgcgctttccgggaacgaggggaatttggagttgctgttgggcaagaccgggtttgcaaagccaggtcatgtactatatggcagtgacttcccttatgctccagttgaaaccattaacaagtatgtagggatgatggagggattcttcgcaagagaagaggagaaggaagaggagattgcccggggtgcggcggtagagttattcccgcgatttcggattgagaaggatagggaggaggtactgacgaacccaggctattgatagatacgtatatacagggttgtgtggagagaaatacattatcatttgacgatggtatacctgaaggggaacacttccatcttttacttcttagtattcaatctaacacttgtagtactttaacagatttcagcttctcattgataatgttaactagttaactagttaactaaataacagataggttattaataccggtgaatgaacatatctacaacgatcgatgtgtttactacatgcgaagaagctatgtatatcggtagcacagtacacgggcatgcctaagtccacatcagctcgtgacattatgctcgtctcccctcttttccttgacactgtccttctccccgcactctgtgcatgactgagactattcgtggtttctcaagatctagctatttcactatgacttatatcactgtgactagggtctgaaattccggatttgacggctgtatttctctttgaatataattatagtgaggtcgcaacgtggtaagatctgctgctttcggacctgtcacgcaacgtcggcacttttgccggtcttgtttccacgcatcttttacatattccagaccttccacgcactttcgcaccaaatgcacatatgatccccacgcactttgcgcagtagcttcaactaccacgcactagaaggtctgtcttcacacgcaccactacaatggctaatgcttagtaccacgcacttacagaacccctccactgagtagcgcaagtgtctaaacgaaagaactgtggagccaaaagccagaagcgaagcaggaacacagaaatagtggccttggtttcgtggcatcagttggggggcgacccgtgaacatcatggccgatgctccattctccccatccggtggagctcgagctccgacctcgtaccccaacatctcctccatcccacgccgctcctcctacgcttcagtagtatctggcaacacattttcttcaccaacctctacttccttctcacatctactcaacgactcccatccaatcccctaccccccgtccgacagccgagtccaccgggctccgttcggcgtggatgccgcagacatgcacatgaactccgcctggagaaacacaggttcaacagactcacttcctccctggtcccgcaagtatgccggctttctacgctcggccgagtttccgcacggcctaggtctcaccgacagcccggccttcctcattccatcttacctccgcaactcccgctacatcgcccgtctcgaaacagcccaccgcgctaagctcgctgctcagcagcgagaaccctcctcatccacaacctctaatcctcccctttccgcatcctccagcaatgtccatctgccccgcattgccccgtcgcaccgcggcatgacatatgatatcatagagaaggaaccgtcggcaccagccgatcccctcatgcccttgcctagccagtggagctccgtagacaagttttctggtctggaactgtctaacgaaaacttcgatgttcgctacactggtcccatgcacaagcatgatcatgaggccgctgccttgcgcgcagatcaccctatgccgccgcagtgcgggatctactactttgaagttaagattgagtcaaagccgaaggaagggtatgtggatgagctgctcggtggatattgggggtagaggctgacccttttttttctagcatgatcggcattggcttttctagccccaaagcgtccgttgagaggcttcccggttgggagacagagtcttgggcttaccatggtgatgatggaaagtcgttctttggcgagagtcaagcacaaggtcgagcgtatggaccgacgtttggtgctggcgatacagtcggatgtggtgtgaatttctctacaggatctgcgttcttcactaagaatggcgttttcttgggtaggtttttgtgtggaatgtaatgtggatatcttaggctaattttgacaggaaatgcgtttcacgatctgcgcaatacgaatcttttcccgtctgtcggaatgaagaaactaccgccagtacatctcaaaacgaactttggacaggagcctttcgtttttgatattgatggcatggtcaaggtttgtgctgtttccatcccatactcggaagttgtcgagctaattcccaccagcaagagagattcaacgttctgtcagagatcaacgaaacatccacggctggtctacaaccaccgttagacgagtcgacacttttgcaagagttagtagcacagttcctcgcccatgacggctacgtagacacggctcgtgcattcgcagaagaggtggccaccgaaacacgggccctgcagaacggtcgcaacgagccactgaagaaatacgaagtcgaggaagaccgcgaggctatcaaccggaacagtgagtctacacctccgcattcctcccatcgccaagtccccactgacagcccatagaaatccgctccgcaatcctagatggcgacatcgacaaggccctcaagcacaccaaagcttactactccaacgtcctagaagaccatccagaaatctacttcaaattgcgctgccgcaaattccttgaaatgatgcggcagtccaacgaactctccgtggcaaccgccgcgaagcgccgccgctcgacatcctccaactcgcacgagcatgctgtcttcgatcaggagatggagctcgacgacggggatggcgacgcctgggccgcggacggcatggataccgaagaaccagaggtcgtggcgcagttcaaccagctcctcacagaggcagtacagtatggccagcagctgcgtgctgattaccccaccgacgagaacggcggcgataagaagctgctggatgatattttctcgctagtggcgtatcctgatccgaagagatctgttcatggccattacctcgattctgaggggcgggttgctgtggccgaggagttgaattcggctattcttggtatgttgcttcacctatttattctgctgcgttgtctctgcttcctacttgcaagcaaaaatgctaacacagcactgtatagtctcattgggcaaatcatctgcagcagcgctggaaaggctataccagcagactgaagtgctggttaatgagatcagtgaagacggcggcgctggggcgttcattaatgttcgggatgacattttgctttgactggcgctgggttagcatcttgttgtcctttccttctttttttttcttcttcattgatgttcctttgtgtggacgggcctaccgatctcatatatcagttttggcttcatgttcatgttgatttacttctactttcacgactctctattttttccactttccttttgtcagattaacttctacgtatctcttagccagaatgatgagtccgcttgggattaattttgaaagttcaatgacctacctaggtactgggtactggtagcattgtatacaattctttgtgacgtcaagttcattctatacctagaggcggtgaggtccggcaatataaaagcggtaaggcctcgcgacctcgcgaacgctggggcttatctcatcccggctaaatttgggtatccatcgatctccgcctcctcgaattaaagggactcgataatacggagtagtctgtgatacctcgaacctacaaaatcttctgatgatcagtcctctccacacactcagctccccaaaggggccacattcttgacatggatccacatacctatgaggatctcagcattcctactcattcacgcgcctccaccaccctacgctgctgctgcggccacaatgattgtgctttgctcgagcataacaatgtagctcttgaggggttggagaaagacctcgcgactgctgctaggctaggtcaggtacgtctctttgtcgaattagttgcccaaatcatgtgggtatgacaacacgccaagctgtttggaggctggctgaaccatgcatgttcgatttgatacatcagcttatcctcattcctcgcggaacactctgtatctcattacttctgttctcctttacttcttcatttcaactactcggactgcacattctgcataccttgtgcacaccccacatgatttggaatcaaatggccacccttggatcacaatctcccattctctcttactgtgttggcgtccgtcatggccacctttcatgattatactgtcaaggcagaatgtttggagccatcatcactgacttttgccctacaggccttgctccaccgtcatgaaagctatatggctgaagcggaagaggatcgtcatcgtttggtcggcagcattgaggatctagaacgtgaaaagcaacaagttcaagcagaaaatgcgcgcatcatcgaagagaatcgcagtttattagagcaacttgacagtctgaatcaagcggtcaccgagtctgacaaccatgtgaagtccctaacagttactttggagaaaaccgagtcagatttgcgaagattgacagtggctgcaacgcgggccgtagagctcgaggcgcaactagctctcatggagacggagcagtctaagctccaagaaagtcttatatcggtgcaggaagacgagaaatcggccgtccaacggtggagaaaagcagagagcacgctgcgagaccttcacgatcaagtcgaccgtatcgagagagaggcacgcgaggagagggatcgacatactgagctcgtccaacgcatggaacgtaagagggatgtggagcgcgagctagacaatgcagcgggacgtctcaagggtgccgccgccgcctccgaactcaaccgcaatgcaggtggtacaaacgttgtctctcgtttcgttaaggacatattgcaagacaacgccaatctgcaggttgggattatggagctacgcgacatgcttcaaagctcgaatgaagaagtgcaaaatctacgggaacaggttatctctcatcagcccctggccggcgtcgatggtgacaatacacagccaaggcctcctcccatcacgctgagcgaggagctacgagcgaaggaagaacgacgcatctctcaggaattgcacatccatcatcatttccacacaccaactccagccccaactacgaagaaggaaaaaagcacgctcaaccgtcgcgtgaagaaacgccgcgccgctgtgggaagcccggcagtgctgcattctgcgacgcgggccaactcgcctcgtagagccattcatcgctcccagtcatctgggtcctctatgtcaaccattctatcgcaaacctctgtctccatcccaccctattcatcctcccgccgctggtcctcaaactcgcgtgctggggattcgctggcaagctctcctcggtccacgttccggacgtcatcgatatttgatcgtgttgaacgtggccctgatttctcacagtctaccagccctgatagcaccgtgttctcttcccctttgatgcagacacggaacctgaagggtcttgatatgccataccgcccagtcggtggctttgataatcacgatgcacccgacgatctatctgcatttgataatgatttctacagtcgccaagacttctttaacacgggggataatctcataagagagccggctatccccgaggagtccgaaccatctccaccaatgtcatacttctcgcctatgggtgaaccactgacgaccactgatgaaatttttactatgcatgtacagccatcttccttgcgcagatcttcttcccatgacagcttgctctccatctccgttgctgggatggacattcatacacccacaagtcgccacaagcgaatgggagactggcatcccggcatgcggatccctcggcgcattttgtcacccagtgtcgaactagtgttaacacccccggtaatctcaactccggccgtcacagccgatcgtgcaaagagctcagagtatacatcccagtcattgcttgcttccatggctgcgggaaacagcacgaagtccgacacggcatccgttgtatccaccgacagcaccagcacccactcaaccgcacttcatgggcccgacaaagttaagttcggtcgccgcgtgggaggctgggtcctaggccgttggggcatggcaccggtctcatctgagagtgactcgcaagatccgacagactcatcgaacacgtctgtggcatcgtcttctgcgtttgagcccaaacctcgtgacccgctagctcaccgcttcagattcccaggtgtgaatcagaagggcccgataatgggcttgcgccctccacctgctgctccaatctctattcatgcagaaagcatagacgagaatctgctgcgagagagtctagctgaagagaatagctagattcctcgcggtctaaatatctgcacatccattgttttttagcgtttacactcgttttaatcttgcatttacttttcttttgtttacttgtgcatcctcgttcggttgttgcatttcttggattcctggtttgggatggcgcgagttgcgatgatacccatgctttcgtctttggtttcctagaattatctatattatacgatgtacactctttggtcattttcacaatgtgtattttgcaacaggatcctgtagcttagagtggtttttctcggtgtcttttatgcttatttttgaaggattttgataggggactgatatatacacttcgtcgagtgcctcgagacagttggagttttattcgtcaagataatcaacttgaacagtttcgcatggagttcccttggagctggttatatactgtgacaacaagtttcatgcaataactaacttttgaatgatttgcatgatatcaccttccctattcatactcatggcctcgtgatgtaaactcagttcaagttgcttatttcgaccgcgaaatccgatatgtccggagcgggatgctggtcgaatggaagaaacccgtctggtcttctgctggtgtcgattcgaatggtagggcctcaaaagcgagtgagttggtttctgttgatgtttagttgcgtaaggcatgaccatcaacgtccatgtatgaacttcaagactcaccacaggcatttagaaacgtgcggaaagtattttcattgcgcaggctaaccgcagtgatgaattcttcaatgttatagttctcaaaaagatcctgcacagtagacaggagtgagggaacaaggtcggtatcataaacctaggtatgtaagcaaaaaaacctaagtgaacagctcataaagacactcactagatcagcaccgagagcaacatcgaacttcagccctgtcccttcctcaccctcatcagagcccaacccagcaagatcccccaccttctccagcggagttccccactcccagacagcaggataaataggaatggattcacgcccatgcaaattatgcttgacacaagcacgaatattatcaacaagtgcgggctcacgatcagtagcaacaatagagcgcacaccaagatggcgtgcacaaagaaacgacaagaatcccgtgccagctcccagttcgataacgcgtttaccgcgcacaagagcctcgcccgcctcagacgccaggaacgaaccgaggtgcagagcagcctcccatgtccggttacctgtagttccagcgtacagaatcacgccgcgcgattcagaggtcgtgacggtacgcttgggacaatttcccgcgctggatgttggcgctgtgtacttgactaacgacagctgctgcgcttgctgcagggctgaaggtttcggctgtgagactagtgtgctccagctttccatgagatcatcgttgatctcctgtatttgggggagatcagaggttagataggtggaatcaaggaatataaaagtgggttttggttttgtattggtgtgaggtggatgtatatgggatagcaaaggaaaagataggaagttcaaaatgcaaaatagcataatacaaacaggtggacaggcatacatcctcctcggggttgataattgattcctcgatgcgtgatataagctgtttcagcactcggcttcggtatctgtccggtgggacggggaagactgcattttcgttgaacatgcgctcgtatagagctgtttgcacagctggctgaatcagcacagggcctggtgggaggtccagttgctggagctcaaccagctggaagtattgcgccgctaatttatcaatagagtcggtcatgacggtcggatgaagactaatgaatgaatttgataccataggagatcgatattattggagcccggggaggagagtggatgagtcaggaatgagataagcaagggctgatcaatacattatgcctcaggcagaaaccgaattagtcatatacgcctgaggcaaatagctcaaacaggctagcgtctaccctagccgagcccacaccacacgaaaattgaaagttcgacatccccagtgaccccgtcgacacttcctccatccaacgcacacaccaaaatggccgactctcccgtcactctgcggactcgcaagttcatccgcaaccctctgcttgcccgcaagcagatggtcgtgtaagaacccccctgattttccccctcgtattggatctgtgtgtgggaaatgcatcgcaggcgcgcaatatggaaattcgacaaccacccagcacaagagaaagagaaagagaaatacaatcggaccgccgcaacacacacagaatcaagcatcgaaaacccaaaagccagaaaaccccgatctgacatcttttcgcgaatatctagggacgtcctccaccccaaccgccccaacgtctccaaggacgagctccgtgagaagctggccgatctgtacaagtccaacaaggaccaggtctccgtcttcggtttccgcacacagtacggtggtggcaagagcaccggcttcgctctggtctacgactcctccgaggccctcaagaagttcgagccccactaccgtctcgtccgtatcggtgccgccaacaagatcgagaaggcttcccgccagcagcgtatgtctttctcttcgtctctgcgattatcaatcgcaaactatgatggcatgtgcatttttgctaacctcctcctacaggcaagcaacggaagaaccgttccaagaagttccgcggtatcgccaaggtcaagggccccaagaagagcaaggattaaacgcctcatctgtaactattcgcacgattcaacatggaccgatgatgcggcatggcgcgatgggaaagattatggcggtggcggctttggctctggagtttcccacctggttatggcttgtctggacccaggtgcggtcggtcgtgtgtggggggagtggtttatcttccttttcagcgaacatcagactaaaacccaaaatgatgcccgttgaatggtgaagatcgtggatactcttttttcttcctgtgcttgttggagctggtgattcccgagaaaaaaaaaaggcctgacgatccccatggaaatctaaaacagggcgtcagtgttgtggttctctgtttgtatgttttttggggaggggatcatcagtcttcgtgaagacggccagggttatgagaatccgggcttcggctgtttgcccgggatgaaattacattttacttgtttctcttcactcggtctggcggtcttgtagactggacttgtatacggggccatgatgtctagatctagtgtagttggatttccagactgtaaagtgaagaacctctgccgtgtagtcgaggcttggtctatatcaagccatgccctccacgttatatgcttcaaatgcggagtacatacttgacacaacggacggttgatatggtaacagttaaccaccttcttgcctacatcaatgaatgccactactatatcaatactaaaaccaaaaagagtgaaataatcatggcagccccttggccaaaagcccaatctaattcctcaagaaccaaatttcccagtaagcattctaatcaaatttcgttatttcggagataaaatctgggaaaatactccgccaaagcattagttaggttacataggcaacttgaaagttattgtccgaggcgctaaagccctaattcagagcgaagtctcacactataacagcgaaattgcatctgatcattgcctggacaatccaacacttgtgattaattgtgattatagtcatggcactaactaactagctaggtatttatcccatccagatatatttcgtaagaaaaagacgtacctagttactagttagaagagaaccagtctttctatccgactcaaaaaaaagagttaaaaagccatacatacaatgcaggaacaaacttcctaaaccaaaccatcacatctagcaatgacaaggcctcgaagcaacacaaaccagccggcgggaggctgtgtaagtatatccctcgggttagatcgcttgtacgatgggacagattacacaacctagaacgaattccctttcctgaaatattcccatttagatttcatttcccatatggaaataccacttattaattccacgtggacttgtttcgtccgggatactagtcgtctgactcgatatgtagatacgcatctgctaccgtaggatttccgagccaaggacccagacacgtccatgtcagggttgtatacggcattctgggttggatcattgtatcactgcatccaagccaagggcggaagtcaggagtccgtcgatgtacagatttatgtgctattttctggttaagaaggatctcggagggcacatgggcacatggatagccctagcccgtgcttgtgactgttgaggatgggggacacatggggatggggttaattataagtactgctttatcaggggatctgattgtattaggtgctaggttgagatataaatacttgagtaagttgtaaaagacattactttcgaatagaccgtagaaggcaaataaggaacacgcttggaaggattgctagaagacagaagactagaatcaacaagctctcccaagtcattcgtctggttgaaacacatatcacgggcagtggagagtttctcatagtaacaatagaaagtcatttcacgaaagactaaacacacatggcatgaaaacaaaagcatatttttgcaacagaaactgatccacagatatgaacactgcataaagccactcggtggtattagggagtaatcttgatgggtgtgacaggatggatatctcatcataatcccccattggatgttttttttcttcttttggatgaacacaggcaaaataaaaaaagaggacagaacgagcaataaaccaaaataggacagaaacatatttcataaacagacgcgagaaagacattaagtgtgggcggaaaaaaggcagatgtaaacggccttgatatgggtatctcttttgtgtatcttgtgggaaagaaagaaacgaccaagagaccgaccaggaaagagaataggaagcagcgaagaccaaagaataaacaatcaaagcccaagaattcgatgggcaagtataacagcgatacaatgacactaatgacatattgaactcaactcaatatgctccctgatgtcccagcggtggaacaggagaacgatggagactatcaagcgatcgcccataatcagacaaatcttcagctaaaaaatcacagggcagaccaaccgtcgagtccacatgtcgaacgcggttgtatggcaaaccattaacaagcgtcggccccgagcagcacacctcggtctcggcaaccctcgacttcctgcgatcaccgcccacatacccatacacatcggggctgcaattggaattcatcacgacaagacgacgtcctaagcctctatcacgggagaaagtgcgtcccatacgtggatcggacgtgttgtactcgcccacgagagttccctctatcatttccagggccgggtaaggggggtttgcagcggagggggccatggagcatggggctaaaggaataggggagtggccgtccgcagttgacatggggacgtatccgaagaggtcgggtgttcccgcgtccgagtcgcttgacttaatgcgtgttggggggttaacgttgtagccaccgtttcctgggatggtgtgcattggtactgtgcggccgtctggggagggtgcgtaccgcgagttccagctctttacgtctgaggctagggtcatacctgagaggccatctggcagggttgagaggttgatgtttggctgcagctggggttggcttcggcaggttgggggtgttgggagggtgcggtctacggcatccgtgtaggacactgtcattgcccctgttgattggggcatgtcgggggatatgtcttggcctgagaggacgaagccatatgcagcatggttgctttgttcttcgaagaactcgccgttgggtctaccattgagatcccaggcgcggttgctccatgccgcggtgccatagtcgagcattgctcccgaaacgctaggcataatatacccgtgcgatgtctggccatggtagtgggctgactgattgtcataaacgtggtccatgccgacgtgttgccgggagaagttggagtggatatccagctcgtattcttctcgctggtatggaacccgaatttgaggggagcccatgaggattgaccttcccccacccttggttccataaaatctagctgcttctctagcagcgtcttcgggggccaaagagttgacctatcaaaagaaaaccaggtcagtgtgactctttcgctgtagatattgtggactcaagactcactcgtatgtactggcattcggtagctccaacactacggcagctggagcaggcaagcccattgttgaggtcaccgttgcacttgatctttcgctttcggcatcgattgcactagtggaggagggttagaagtggccgggtgatcaagatggagagaacacttactgccactagggctcgctttctctgtttccgtggcttttcctctcgctctacgagagtactgcgctcctgtttggccacacgcattgaccgagccatagaaatggtcgagttgcgtcggacttggtctagtccgggcatgtggtcgtatgtgtgatccattgatatagcaaagaacaataacccgttcgctgctcagcagagtagagaagattcaaaggaaaagggcactgcgaatgcctataagtgtttatgaaaagaagaaatagaaaagtagagaatgaaggatgtctctgggaaatagggctagatttaagccatgttttggtaacaatcggtgtgattgattgccttccttttttttcataatatcgacatgatgcgatatttttgccccctgcctttttctctatctatgttttattattattctatatatgctggctgtgtgtttagatccatttgggtagagcgaagacatacaaagtacataggccaaaagtaccctggacctggtgtcttttcttttctttttccttttcttattccttatttctcactttttatttctcttattttaccatctcgtatctctattctattattctatttttttctaaggggaaaatgatatgcaaagttccgcttgcccagatttcccccagctacccccatatatgaaagacagaaaatgtccccggcgttttaaaaagaggtttcacaaggtaacgtcacacggacatgaccagatagccatgacgagaacaaagtgctccggtaggtagtgtttcagccaatttgaaggcttctttcttttcttttttttcgtcatgtctggaagaggaagtagtaagatcctcaaacttggtgtatctcatcttccaagagatagagaaaacgggcaactgccgagctactgtttgcagatactgcgggggagaatgtcccgacgtcccgtggaaaatgtttgctcgatagttctgtatagctgcaggtcaaaatagcccgttctgaactcggacatcgtcgaggtctggaacatatacctagtcttgctatcttgcaaacgcacgtcctagagaaataaataaaaaataatatcaaaaggagaacaaacgcctgtcttaggatgctccaaatgtctcaatagagaaagagaagagggggaaaaagaaaatataggcaaaatctctctcatgacacctgtcaactttgacaagcgcacgagttggccccgagccaagcgcgctctagaaaagtccagggatcaacgatcgaaaacgctgatcggcgacatggggggcgattcagcgttctttagcgcttccggcacgcagctagatcgaaatggaaggggggaaaaaagcaaatcaggcccataaaatgagaatagtccgctgtacttacccagtgtatgtaagtacgcttgtgttatccataccagatcttgatcatgatcgacgctaaagctaaagactaaaaggggatctagaagtactgaaatgcatgaacatctaggacacttgcaaggttcgcacattgctacttggagctgatgtggagagaaatgggtatgacatggggcagataattagaaggggtttctccaagattagtatagtaaaccctagttctaactcgtccaccttgagacattcggtgacaggacacgacaagagacatagagaaagagaaagagaaaccaaaaacagtggggaaggcaatcaaagtctgggtttcaaatacaaatctagacctggagtctccagcaggtgtttagacaagttccggcagttcaaggtttgacgatgcacgacatccggggggaagtaggaattgcgaagagttaggagaaacaagccctagctacgccagctgactctaagtcggctcgccaggaacatatgttgggattgagactggcttttgttgcagacgatacggtggaggcaacccctggctgctgaccgtagctgcctagatcgagagagggcaagtggctgggctgggtaagcggctgattcacgattgatcatatcctaccccacgtgtgtgcttcgttcccagaagttgatgtatggtcatagtgatgatacccgttggatcatgatgcaggaggccgcccgtttccccttcccaccgtttctgctgtggaacggctcacgggggaagctggtgctgtcctagtaataggaggaccgtgtacttcctgtggaagctgcgagacggtgccatgatcttagtggggaaagagatacataaaagacaagacagcacaacagggtgtggcttggtcttcccaggatttggccagtgacaagtcagttacttgccaagaagagatgcttcttttggttgggcctgctggtgcatgagggatataagcacgcaaacagttcaaacctagaatctcagaatcccagggtcgatcaaggcccttaataagatccgctgcacgtcgatctcaaaagcgtaaggttatatccattatggcccaacgcggacattcggaagatatgccgctcgattgacaagcatcgtttcacaagtctcccgggtcgatcatccggagagccctagagctgttgcgcagcacgcacccgtcggtagattcgtgcaagaatccttttattggaaaaatcgggagagaagagaaaagcaaagaaaagacaacactgcaagaggctcagttccctccggttggggatccccgcgggcggtgattggtcgaagctccgacgatcttctctcgtgcatttcgcatttctcgggcttttacattctctccctacacctcttcatacctctctcatttcgaaattagtttgccctccaaggttctcgtccaagcgcctaattcggtatcttacacccgattccccgccatgagcgcgctcttagagacctccctaggcgacattgtaattgacctgttggtcgatgatgcacccaaggcgtgtgacaagtgagtggctccattccttggctttcccagtctgctgaacctgaaactaagctcattttgtgtgcttttagcttcttgaagctatgcaagctcaagtactacaatttctcgcccatccatagcgtccaaaagaacttcaccttccagaccggcgacccgctcggccctgatgcacctgagagtgatggaggatcttcggtttggggtctgctggatggaccgtcgaaaagaacatttccgctccaggcgtcgcgcacgttgaaacacttggagcgcggcacggtgagtatggcgacggtaccggcgaagaacgaccccgaccaacggctagccgccagtcaattcatcattacacttggagacaatctagattatttagatggcaaggccgtgattttcggcaaggtcgtcgagggcttcgatgtcctagagaaaatcaatgagtccttcattgacgaccgaggtcgaccgctgaaggatattcgcatccgtcacaccactgtgcttgatgatccctttgatgacccaccgaatctagttgaaccacctgaaagcccggtgccctccaaggcccaattagccacggtcaggatcgcggacgatgaggacttggatgatgatatggatgaagaggctatggacaagctgcgtcgcgagcgtgaggctcgcgcgcaggcgctgacattggaaatggtgggagacttgccgttcgccgacgtcaagccgccagagaatattctttttgtctgcaagcttaacccggtcacacaaggtttgtcgcattcccacacggaaccgtgaaattatgctaaccgatgctagatgaggatctgaatcttattttcagccgctttggaactatattgtcttgcgaggtcattcgggacaagcgcactggtgacagtctacaatatgcctttattgaattcgaggaacagaaggcctgtgaacaggcctatttcaagatgcagggtgtattgattgatgatcaccggatacatgtggatttctcacagagtgtaagtgcacctcatcaccgctcatctcctccgaccaatatgctaatacatcccaggtatccaagttatccgaaagctggcgcaattccaccgtcaccaagcgccgacagagaggtggatttggtggtgttgccgaccttgaagcgaaacgacaataccgagagctagacgaggcgcccatagatgaggatgatgctagatatctgtttgacaaacgaaacaagaacaggggcgctccagctccgccccgcgaggctccgtcagaccgcactcgcggtcgtcgagatcgagggagtcgaagtccccgtcgtgaacaggatcgataccgtcgtcgatcctatagtcggagtccacagagggattcacgaagagattcacgaaaagaacgaagctacaatcatcgtggacgatagtagtcaaatatcccctattcaaataaacacaacttgcaccatacggagtacatatccactcaacttcgcccctgtaagccaaggccccgcttcagctagcctattaatttccagtgggcaggtctcactcggcgctcgctagcgactttcttgtatgggtagctcgttaatatttgcccttgtagatccctaaaaataaactggagcccactagacctcctaatagtctgggatatattattagcaaactggagtgtacggaggttcactaaaggtacttaatcagcttgagcttcaccccacgttttctaatttttagttacttttctccttccttctcttcctcattctcctcccaatttattctacttctctcaatctcaaaatatcctccaaaatggcaggcgtaatcaaagatgctatcaacaatgttcttggacacttccatggcaccactccagaggttccccgtgaaccctccgcggaagagttccaagcactacaaaagaaatacacagacgctggacaagggcatgtcttcacttttgtcgacgaattgacccccgtcgagaaatcacagctcttccaccagctgtccaactttgatcccgctcggatcaacgagctggccgacaaggccctcaaccctcctcctgccgagcagggaaccgtgaccctcgagcccctccccgaagtcgccacagcctccatcctcgactccgacccctcagatattcagcaatggtatgaagccggcctgaaggaggtggcagcgaacaaggtggccgtggtcttgatggctggtgggcagggtacccggctcggcagttctgcccccaagggctgcttcgatattggtttgctgagccagaagtccctattccagctgcaggctcagcgtattctcaagctgcagtctctcatcggcggtcaggatgtcgtcatcccttggtacattatgaccagtggtcctacacgcaaacccacagaggagttcttcgagaagaacaactacttcggtctcgacaagagcaatgttatgatcttcgagcagggtgttctgccttgtatctccaatgatggcaagattctgctcgagaccaagggcaaggtacgtagtatacaggcatagctcaaacgcgtgtaggaaatttgttgaccctgaaaataggccgctgtggctcctgatggaaacggtggaatctaccaggccctagtggtctccggtgtgcgggaggacatgcgccgtcgtggcatcgagcacatccacctctacggagtggacaactgccttgtcaaagtagctgacccagtattcattggctttgcagcctccaagaacgtcgacatcgcgaccaaggtggtgcgcaagcgcaatgctaccgagtccgtgggcctgatcctgttgaagaacggcaagcccgacgtggtcgagtactctgagattgacaaggagactgccgaggccaaggaccccaagcagcccgacgtcctcaagtaccgtgccgccaacattgtcaaccactactactccttccggttcctcgagtcgatcgagaactgggcgcatcagctgccccaccacgtggcacgcaagaagattgcctgtgtcgataccgcgactggtgacattgtcaagcctgagaagcctaacggcatcaagctggagcagttcgtctttgatgtgttccccatgacaccgctggataagtttgcctgccttgaggtgcaccgtcacgacgagttctcgcctttgaagaacgctcgtggtactggtgaggacgaccctgataccagccgcgcggatatcatggcccaaggccagcggtgggttgaggctgctggtgctattgtcattaccgatggcgaggccgttggtgttgaagtctctcctctgatcagctacgtatgtctctttttctctatatcatttccctggtcacaactaacatacattacagggcggcgagaacctggaattcctcaagggacgggaaattaaggcaccggctatcctggagcgggaagagtagatcagatgggatctaaccagtcggatctcgcggagatctcttttggaacgaagaaatgaattgcattgtgacactttttggagaatggatctactgaaagaatgtagggtaaggaattcgtagagtattcagagtactagtgttcaatatgagtagaacatagaggaggagatagaataccccgtacctacatacactagactgtgtatagaacgcctggagtagcaaagcgacgccttacgcaatacggaaaagcccgggagctaaagccgtttgacgagtttgtcctttttccacttttcctctcttctttgtgtgcattctcttatttaaaagaagttggagctgttgagagaggttattgaagttgttgagagtgtgagtttcttctatttcgtctttctgtctatttcttggctttttcttttctgtgtggttccctcgtgtcccacttttttttttcctcgagtgggctgtcagaacgtgcttgcttttctccaagggttctcaaaaagctgacaaaaagtgaccatttagatttttaccaggatttgaagagttaccgtgagggtgagtgagatctgagggtgtttattcgttcgccgagctcgtgctctcccccgccgatctacgtcttcccctctttcgcctgaaatttttgggattggcacgttatgcgattttgctggactcggacaacgtcggatataatatgcactggaattggagtccaaacaaggctcgacaacgcatgatggccagacaattcgactaccccggcaatgcaggggaagacgctgcttatcgacggagctataccaaaccataaacccggcaccgggctgacttgcgatggatagattaccgccagaatgatgttgtctcgtcgcgcatgctacaagtgtggcaccattggccactacgctggttagtatagctggagtgctatatctgggatcaaactaattcctcggtagaggtctgctcttccaccgagcgtctctgctataactgtgcgtgaatatctccccgagaggtcataaccttatcttacttggcgctaatttgttttatctcataggcaagcagcccggtatgttcaaccatgagtcataatactcaaaacaagcttctaagtcttcatataggccacgagtcgagcgcctgccctctgccccgtaccaccgagagtaagcgatcactcaatatcaactgtgctgccatcgcaggttgctaacaccatctagccaagcagtgctataactgccagggcctcggtcacgtccaggctgactgccctaccctgcgcctgaatggtggtgccaacagccgctgctacaactgcagccagcccggccaccttgccgtaagtttcatcccctaagcccaggtctgcaacctttgaggcggttactaactctactccagcgcaactgccccaaccccactgctcccggagctggtgctccccctaccggtcccgccgctggccgcggtgccggtggtgctcgtggcggtttccagggtggattccgcggtggattcagcggctacccccgcgccgcaacctgctacaagtgcggtggtcccaaccacttcgcacgtgactgccaggctcaggccatgaagtgctacgcctgcggcaagctcggccacatctcgcgtgactgcaccgcgcccaacggtggtcccctcagctccgccggtaaggtctgctacaagtgcgcccaggccggccacatctcccgcgactgccctaccaacgagggtgccgctgctcctctcgctgccgttgaggttacacccgttgctgctacccccgttgtggctgcccctgctgtggtcgctgttgagactgtcactgaggctaacgtccctactgcggctcctactactgcagtcgcttaagtgtgttcggtcctatctctccaccgtgcatttgctattgaagcaatgcctggagttccttttcttccttgattctgtactacggtcactttccctacacctcgatcggtcctttctctccgccttttcttcctttgcatatatttaaatcacaccccttgttttgggaacgaggtctggttctggaccttaaaaaacaacagcttttgatttccttttttcacccccttttggacgtttggaactcgttctttttttacttatttttttttatcaccctatcatgtatacgacgaacaaacagaaaaggttgtttttgtttttcgcgaagccctcgacttgatttctcaagtcttaacgattggcgtctgttgtctattctcatggattatctttcttggttttcgattgactcttggttgtggttttcccgaatggggccaaggagagaacgaggagatgaagtgtggcaatgagaggatatgttgaagctgaggggaattggattcggagaccgttgcaactggaaagaaagagagcttccagatgagaagagtcctgagaatatttcgagaaaaaaaaaggaaatgtctcaatcaccttgttcttgtagtgtatagatgtagtgcgctctgtgcttagtagctgtctaaacccgtgaccttgatcacccaggtcgagtcttttacacctcttgttcactctacaatctaccccatcagtcagcttcagatagccatccccaattgatccacatcaagatgccgggctcggttggaagtgatgaattcgacgatgacgaggtacagtaatcctcatacccacgcacgtcctagagctgccatctaaccaataaatgatctacaattgcaggccttcattctggacatcgacggcatccaggcccacggcattggcgcagccgacattaccaagctgaaggccaatggattctacactgttgctgtcagtcctcatcttcgcatagttcaagccaattccatccccaaacctaaccactcatccagtccgtccacggcgccacccgcaaaaccctcctaaagatcaaaggattcagtgaagtcaaggtcgagaaagtcaaagaagcaattcagaaatgcctccccacggcctcgggtttcatcacagcaatggaactccatcaccagcgcaagaaagtggtccgtatctcaaccggcagcaaacaattcgattcaatcctcaacgggtgagtgcaataccaatgcccctgtcaaactccatctaacccaatctaaccccaccagtggcttccaaagcatgagcatcagcgaagtcttcggcgaattccgctgcggcaaaacgcaactctcgcatacgatgtccgtaatcgcccaactacccaaggaagcaggcggggcctccggtagagtcgcctacattgacacagagggcacgttccgacctgagcgtattgcccaaatcgcagagcgattcggaatggaccccgacacggcgcaggagaatatttcctatgcgcgcgcgctgaacagcgagcaccaactcgagctgctgaacacgctttctcaggcgtttgcgggtggcgagtatcggttgcttattatcgatagtatcatgaactgttttcgggttgattattgtgggcgtggagagttggcggatcggcagcagaagttgaatcagtttttgatgaagctggcgcatatggctgaaggtgggttgttttatatgtgtctttgctcttttggctgctttgctgattggtctgacttgcagagttcaatgtttgtgtcttgatggtgagtgcgatattttgtttctcgaggtcttgtggctcacgcttcagttcagacaaaccaagtccagagtgaccctggcgctagtgctctctttgctggagctgatggtcgcaagcccgttggtggacatgttcttgctcatgcttccactactcgtgtgctccttcggaagggtcgtggtgaagagcgagttgcgaagatccaggattctcctggtgagtacttcgatatagtccgggtgctaccactgttctaactttttctaagactgcgctgagcgtgaagcaatctatatcattaccaatggtgggatcaatgatcctgacaaggcttgagggtagggtcgagacgatgtatcgatgttgagggaaatgctctgcagtcacgattttcatgagatttcgtgatatctcaggttttattctgtggtgattttataccattaatcaatttataccatagagaataggttagaataccaactccaagttatgttcatgtcgatgtagttgaagccctaactaagaaattcaccgcctacaccgccgctctgacatcccggcaaaattctgtgccaagagcaaatctgcagaaaaagttcagctcaatcaacgcaacaatccagcgtcaaacctccattcaaaatgaagggcgaatccgtgcaggtagaagggtataccaccctacctgtgcagctcccaacaacccccctcttcccctatcctgcaacacactatctctacatccgaccacacgaaccccgaatcccagacccagattccacccgctccctcttcatcgtcaacgtcccaatcgacaccacagaagtccaccttcgacacctcttcggtgcgcaactcgccgcaggccgcgttgaaaaagtccaattcgaagatgtgcagaccaaaaagcgcacagcggtaacaaccacagaaaccaacctaactcaaaccaaaaagaagcgcaagcgcgtaactgccgatgactttgaacgccacctagacgacatcacgctcccttcaacctgggatcgcaaacttcaaaagagcggcgcccacgcagtcgtcatcttcgccgacaagcccagcatggagaccagcctgaaagccgccacgaaggcggccaagcggggcaccaccatcatctggggcgacagcctgccgaccaaccgcatccctgtcctcgggctaaaccggtacatcgcgcacgagcggatgcagtaccctgatcgggggacgctgctgcgggcggtgaatgagttcatgaccacgttcactcaggtgtctgaggtgcgcaagcgcgaggatcacaagcgtcttgctgtgccggacgaggatggattcgttactgtttcgcacgggccgaagttgaattctgcggcgagggaggaggagatgaaagagcttgttgagaagcagaagaagaaggctgagggactcgaggacttttatcggttccagtccagggagaagaggaaggagagacagaaccagttgcttaggcgctttgacgaggataagaagaagttggcggagattaaggcccggaaggggaagattcgagtaagttttctcttctttgttcacttgctccttggtccttgaggttttactgactttttatacagcctgagtaatctgttacatgatagcatggcgttatgggtgtcttttttcgctggcaagctaaaaggttcgagaggtgtcctatgtacatgtgagtttttaccttttctttgccttcttttatgctcgctcctatgatgaactcgctggggccatagtagcgaaacgcgtttgcccgctgttatgccatgactgcaaacaccagcatatctatatcttctcgccttctgaactggaatttcgtcttaccgggatttattgtgcttcttggtgtcgcatctgctaattgtgattcgaaacaggttcgatacatacatacctgttaccccaatatcaatagttcatgacccaattatatatgttcgagttttcgtatcatccatagccaactcgtagatgtctctaattccggatctcccgcacagaccaacgcttggcgttacatcccacctctgggaaacaggacgtcttatgggattgatagctctgccaaagtatagaactgtttaaaaacatcggagaataatggctacagtcagctgtattatttgatactactttcggcaaagtcacgttctccaagcctgtggcaaaagcttcacacgatatatcccgcatgatatatccagcaaaaatagctctatctcagtggcatacagcacctcatcggccattcttcgctcttttttcataaaacccccatcaagagtgagaatcttaatcattgaatctggcacattctatctatatcgaaagaaagccacaagatgtcccctgcctcagtcaaaaatgagcaagacagcgactccgactccgacgtcgagttcgaggatgtcccaatctccctcccaaacagacccagaaacagagaagacagaggaatcccgataaccatccccgcaaccccgcaaccacaatggactccaaccctatcactcccgccacagcgaagccaacccatcccctcgggctccgaggaagaagtccagctccgaggccacatcagcaccggcatagagagagtcacataccgcaaaatgaaatccgacatgggtatggacgcaccgggtacgcccgcctcagaacgcaggtataatggcttcaaagcgctcgctgcagatgtggagggtcttattgatacgctttgggcgtcggcaacacgtgagttttatatcttatacaacgtagaagtggattatattgttttatactatctttattgccttcctttttgacaccatctgctacattctaaccaattctgcccagcggcaatccaaaccgaagccctcataaccctagcaggcctaacccaaacctccctcccagccttccccttcgatgccccaccgactctaaacatcctatacaagctcgattccgtcttcgcagcgctatgtacaggcacacacccactcaccggcgccgttctaccaggtgcacagctgggccactctctcgtgaccgagacgcagaaggttcggatccggagtttagcggagaggactagatatgaagtgttctcttgtttggagaagtcgaaagatggagctaatgctggtactgttaatactggcgggtatggatatggggatgacgaggacgaggatagtggcgacgaggtcgagccgtggatgttagaggccacgcgggtttatgagaagagtcttatgttgcttgcggagcaggatcccgaggtggacgcggggatggatgagttcaactgtttgtaatgtatattcaatcttgttgcctgatctaggtgtgcctatgcggctccaacattaaatagatgttggtgaagatgatatttttagaatggatctcttgccattacgtcggtgtacatatggtgcatacgaggcagacgctcaggccacacacaaaatagtgaccaagtagttcggagcacgtcccacaccaatttgcattacatacggcctctattgtcctaacattactacctatggacgcggatatttctagaaacttctagctaatgaaagaaaaaaatctgcaccgaaaaataaaaaacaaagagcctgtggggtccaggcaaaaaagtcggtcgattttattcactatacaaatgccgattggatcggtaatgaagtaatgaggtttacagtaagagttcccgtacctcgaattcaggtatcagtcacacccagtgttagcactctctttggccagaacagagcgaactaagtggatgtgagccctgaaagtgggggtcattggggccagctagtggcctgggtctgtgtagctcggggctgcaatggccagtagtaagtccgagaggctatagtttagatgtacatcgtgaatatacgatttcgttggctgtgctttgacctggccttttttgccacgtgaaagcgaagaaagtggtaactgtgtcatgacagaggggatataccaatagttgtatgtgcatatgctttggatgatatttccgatggtgggaacgagctgctttgtttccatggttcatactgtatattcaggtataatatgagattgtgttactgaactgagctataactagatatatattgtgggatgatgttgtagctgcctatataggtcgtttgcttagggctatactattccgtacaacaagaccagtttgccgtgtcttaccatgcaagggttggattagcttattttcatagagctgagcaggtgaacggaggggttagatctgaaacctaacatcccaccttaatgaatatcatcccttgcacgcaaccccttccacagtataaaacatacaatagagtaacatggtcgaaaccatgtcagtagagcatggttatgggtaattcaatcttagaaacgcgtcgcgtaccgcgtagagtgaaataagccaagcagatgaaatctctgctggtaaagcagtaattccaatacgagcggccccccaatcctggccaataagagcagaactttgcatggaaagtctcccatggttctgatggagcctttttttttctttctttctctttgatgtcttttttcctggtcctgttctttcatgaccggacgtgcgcggctgaggtattttgggaatacgaaggggaggaaaccagattgggaagtccttgcgtgcagcttagggcagtacaggacatggattagagaaccttgcttcgagaagattggattgggggctctctgtgacctctggtagaccttcagctccagggctgcagacagggtatctgggtgaccttgctgtattgtggaaatggaattaccgtacggggctgctggttccatggttctgtggcgtttgttctcttccaaggtttgtcttgcttattatgatattacatacagtagatcgggtgtggacatgctactagacaccatcatgtctatatccatgaacaccttagtatagccctagttttgcatataatacaagagatcagatcaaaccactgcctatgctaagatgtacggagtacccaacaggttactacctgatctgcttgtactcttactcagcatatgacgatgacgagggctcgggagaggcccacacagacctgaggagttgacaagtcacattgcgagggcggcgacaggtccttgcagatttcatgcattggggcttccggccccttgttcttctggctttcaccgaattttgttcacatttcttttttttttttccctgtggctgatcatgcggacaggtggaagaggtcgatcatcggcaacgaactttggatgcagacctcgggtcccagggtatgatgtatcatcttcaattctcccgggcttcccgggattctggtacgatgaagaatagtaagccccccgcatgactgatatcatgcatttttgacaggaatctggggacaggctggtatatataagtattctgtacggcgtacggagtagggtttgtacctgcctcaggtcaagagaggaaagagctctgatcgacaaaggcaaggcattctgcactaccggctacagtgtacaactagtagatatcatactgttgatactgatctatacacgcagttggatactagactcgacctactctgtactatttagtatgttgttggcgacatacttcaactctggaacggaacataccaataccctgtaatacacttaccataccgagactcacgtaatgcgtttcccacttcccctctctcttcatctcgcgagatttccaattcttcattttcttcttttccccctcctaccttcccctcccttttcttattgttcgaagatctcggtttcaattttctgtttagttatcgggagttctgcttttcctcccttgttgccgattactctttttttgcctcgcgcatttccagtgttttcccaggttttcctcaacatctaggtaagttgcttggtgttattctatcgcatgtcgcatcttggccccaagcctctttcctcgtttgaatgtaccccaaattctgtctgccccatatctatcagcagtccggcgcagcgcagcgcaaattagccctagatcgcaagcttctttgcagggttcacgattttagtatggcgacgccttcgccttgaccagcgcttcgggacatttgagccgattatccaccggtcgcacgcatctcaacctcaaaaacgtcgccaatatgaggaatcggtccgatctggatgtctgacttgcccgaaaactgtgctggattgagagggtggacggtcgcattcggacatgaaaccgggacgacggaaacggccgacgcatgatgatcgcctagcacccgagtggaagcaagtccattttcgtctcgcgcatccgattttcgccgttggattgttcgtcttcggcgactcctcaaagctagcatcgtgagatgcgatgcttcccgaagcactagtcttggcgatttccggcaccactttttttgaggctcagaatcatatatacgcccgaggaaccagccgcaaaaatgctgactacgcacttttttttcccttccgcatcgtttactcacttgcattgcttggttgcctttctctgctattcacctctcacttccttttctttactcgcgcatatgcagatctgcttcaatttcattgaaaattgatataatctgactttatatcttccctagcttttcacgcccgtctctttgcttggcttcgttacgacttgatctcacgccggtctttctttaacgactccacgaagttctagtcgctcagacatcttatattcttacgtcgactttccggactttgatcttgcaaccatgtcttacaacggctacgaaaacttccctcagcaggatcccgccgctgctggcgccccggctcccgttgacaccaacatgaccggccaggccgatccctccgccgctcagttccagggcccccctcctggtgagcccaactccgctcccgtcccccagcagggtgccgatggcaagaccaccctctggatgggtgagctcgagccctggatcgacgagaacttcatccgcaacctttggttccagatgggtgagcaggtcaacgtcaagatgatccgtgacaagttctctgggtaagactgcaattagaactttcatcccaaaattgtttctaatgtgggtagtaggagcaatgccggatactgtttcgtcgacttcgcttcccctgccgccgctgctaaggctctttccctgaacggaacccccatgcctaacaccaaccgcgtcttcaagctcaactgggcgaccggtggcggccttgctgatcgcaggtaagcgatgatctctttggttggttgcctcccggctctaaaaaactgacccgtcccagccgtgatgaccgtggccccgagtactcgatcttcgttggcgacctcggccccgaggtgaacgaatacgtcctcgtctccctcttccagagccgcttcccctcttgcaagtctgccaagatcatgaccgaccctatcagcggcatgtcccgcggttacggcttcgttcgcttctccgatgagaacgaccagcagcgtgctcttaccgagatgcagggtgtctactgtggcaaccgccccatgcgtatctccaccgctacccccaagaacaagggtcctggtgtcggtggtaacggcggtgccgccatgggtatgcccggtcccgctggcatgtaccctcccatgggtggccctcccatgcccttctacggtgctccccagcctatgaatcagtttacagaccccaacaacaccaccgtcttcgtcggtggtctgtccggctacgttaccgaggatgagctccgttctttcttccagggcttcggagaaatcacctatgtcaagatcccccccggaaagggttgtggtttcgtccaattcgtgcagcgccacgccgctgagatggctatcaaccagatgcagggctaccccatcggcaactcccgcgtgcgtctgagctggggccgctcccagaacaactccggccccgccggcagcccctaccgccctgctcccccgccgcctcccatgtacccctccatgggcatgcccccaacccaccagtatggcgggtttgcccccatgaaggtgagcgatcaccctggcagcccgatcccggatcaaatgtgaagcaggcggtcggctgacacactcttccagtaagcgtttccctttgattgaaagcaccagcaggagttatttgtgtcattccaacgatgattctattgtgtcataacaaattcgttccttggtttctgggccaaggctatagctcttgatgagcatttgtctcctgtgctacgcatttcctttttacgtgagcgctattaccttagcaagatctgagctttatcccctttctgatctgtcttgttcttatgtatctttccttttttcaccctctcttcgactctccccctttgcgccccgtcgtattttatttttctttatcttattttcgatgtgtctctgcccttatgctatttatgctatctgggtttcccgccactgggtctttgtctgcgtgtaatggaagtccgaattgtcctgcgcttctttttcccttatactccttgggcaggcattctgcgaaaagttccatttcccccaccgttaccacttttaccaccttatttcatttgttcctttttttttctttttttttttcttttcttcaagcagctaaattgaattattgttcgctttgagaatcttcgcgtcgtgcttctttttacccttgtttcttgttaagactgattgccggcttgtacaacacgctttttttcgtgcgcctcagcgtttgtcgattctaaattcctttgatcgtatgcaataatgtcctgtacgcttgtctggtattttgcattgcactactgccttcaagctctccatttcctggtattgtattgtcggcccttggcttctggatctacctataaacattgctcctgtggctggtcccataggtggaggtttcaatggactcgagcatatctggttgctctgttagctggtccctggtggttgtcttgctatattgctgtctgctgtctgctatcttgagagtctactgggttagggctgggatttggactggactgactctgagactactcttctggatcattgtaaatttcttaattcctgaatggaatgtatataggtatggctcttctatctttttttaatgcttgatattcgccggatgaccattggcaagtggacctcggaactgtacaatactcacatatatgaagtctacatacatccatacatgtacatagaaacattgggtgtacacctccagacgtcttatcaatatgtctatcgataagcatactgcctaccattatcgatgctataggagtgctactcaaggcaacaacgaccgtgttgattgtataccgccttgcacgacttcccataatttgtatacaccacccaagcaacttcgagatgatcagtccatccattctctttttaccactctccacagcatcatgcgctacagaaactgggatgtccttcttttccctggggcttcgaaggcccccatccaagagttcaagacacaatgttttgtgaccaaggacaaagactcgccctatctacagaatgctgtcttccttggccctcatgcacaccatcccgagccaggtgtttttaaccagctgccagtcctcacaacattcatcccaagtctacccaaagacagtccgttccaagtctcagttcacagttgggagaagccacgtcccagtgtccagattgagtccaatatggaaccagaggacgttttgctgttcgaggcacgggtcttcgttgatggggtctttgttgcgtgagtaacttacgatctatgtactctgatgcttggattaagctgatgtcttgcaggggtagtatctatccacagagaactagttggccacaggttatgggtatgttgcgcgcgcttgcttcggcacaacgcagttctaatatccccattgccttgcttggttttattattgaatagctactgacattcatttgccagatctgggctctagtatgcgattccttctttccctttgatttcaaattctcacagtccgaacagatcttgatcgagatggaaaccaagatgtccttcgatttcctcccttccatcctgagatactacaacagaagcattgggatgccggggattctcaaggtcgaatcaaggttatcatcgcagaaggtttctctcgccccaaccgctcacccccgttcgaacgatacaagcatgtcattgctttctctttccagcatgcaccactagatgtgctggaattctctgacattgcttggcccaatcccaacatgtggcttgctatgccgaacgcatcccggtatggatcggcggccagatatagtacccccagggcagttggcgatggcgcacatgggcattcgccaagcaaacctagcagatccgatcatcgaagtacgattacggccaacacgagcagccaatctagcagcaatgcagctacttacagcggtagtaccgcatcaacttacaatgcctggacccctcaccgtgggtttcccattccttccacacaatggaacggctatccacaagaacctcgatgggagccacaggaaacatacatcgtggaacctgtcatagacgccttcgttgatgatacagcttggcgacagcgtggtgctcgatcctctcgcgaggacatcccaatgccagactatacttccacgggatcgaacagcagccgggccatctccagcatgactgggatgagctacgaacacagcaagcagcccagcatcaattcatgtcttgacgatgagcaatacaatgagctgattgaagctctgacaccaacgaaggctcctccaatgggtacgcgcgcaccatctaatactccatccgctgtcgccgccgcgacatctgcctcaaagccttctgctgcagccgaagctcgatctgcaagctacaagacccgaagccgccgtgcatccgcactcagggagatttcacagtcaagcacccgtgatgtttcgggatcgagcgagcccaagaagaacttgactccatccaagatcggggcgtgtccaagcgagaaggtccggagcaaaaaggagacccagaaagaggccagccaggagacccctaaagcgcagtctaagggtaagtgtaaggggattgcgaacgaaaacagcaactccagggatgtcgagaatctacaggacgagaatgagtcggttttgtaggatcgcactggccatgatcatgatgcttttcagcttatacttacctaatcattcatttgttttagttcagtgacatgaagccggcatgtatcttttatgcgagcttcaaccaatgcactttttactacgaagtcgacaaatgtactgttttataaaaacttcaatcgataattttaccctatttcaagctgacaagtatactttattcgaatttggactaacactagttactatcacgaagagtctttatccggatctcgagcaataattcttccactatatgaagtactgttttatgcatgcaattcctgtactactgctactacttattcacacatgatataacaatagcagtagtatggtattggatacctggcattacatggtgtcataaggcggtttcaaacttcgtgccttctcaactgccttctcaactgcttgtttggtatgaagagtcactctaccaggcgactgtaaagtgacttcgctctctttcttcccctccctctctctcttccctatcatcgcctcttttcccatcttcgttcttcgctgccacacgtctcttcttcaccgcatcatatcttctctctttattgttcatgaacaccacggaccacaatatccagccaggataaggctgttcctggggtgtcccaggccaccaggcacccttcattcattactttcttcaggctcatcaccatgatgactgtcgcggtgtgtcctttagcataaatacatcactcaatacattcaaatttggattgggaggttctacttgattgcaaatgtaagaagaactctttcaaaacacgtagttggctatatagcattttgcactattcttgctacaacaccaataatggagggaaatatctcgaatacatacaaaaagaatatccggggagacatctcgggagactccaaaaaggtcttccaaggacgcgttataattgaccactttggcatgttccatagcataaagaccattaaaggcgcttgaactatcaagttcgaagtatttccctttgcttaatcaaataatatcaacaattctcaaaaaaaagagctatcgatggacaagtctagtgagagttcaaacaaatgttatgctcgtattgaactaccttcaacaccagagcctctataatgataatttcactacaaaaggaactcaaataaggaaaatatgattgattaagcttcattctatctaaagccagggagctgtccctagcgaaatggttcaaaaaagctttcagagacaggacaagcaagtgggggtcctacttgcatagtgtaagtatccgtctcatgacaagcgagattcaaagtacaatgaatcaagcttttaaaaatgccctcagagttctcttcatcgagcaagtaaccagagtgctgtctctgatggaaaagttccaaagatttgggttttgatggcgtctgtggccacccaaggattcagagaatccatgcatgtagtaggccctcagaattgtgtcttccttggaaccctgccctgtatcctccgcgcctcctttcctataccctccgcctcccatctcgtagaactttgtcataaccccggtgggtgactgttctatatcctccccctgtctgccatcggagtcctcctcctctgggacgaggccacgccgggtctcagatagcccatccttcactcccccaaagacgtgattcactttcgcgcagtcagaggtcaagataccctcagagtcctcttcactgggcaaggtcacatgtccactggaaggctgtgtcgaatgctgcttccagtgggaggccaggggaatggttgacggagggacctgtgaaaggggcaatttctgctatatatcgtctcatgagtacgcggggacttaccaatggccttttgtgagacacagaagactcacggccccgttgaggcatgcaagtgttagtgttggagagtgtaattggggagagaccgggacagaaaagactccagcctgaattccatgaacttcaggtgtgatagagagaacagcaaaaaacgcatgtctcgaaaatgaaaaatatagaagatgaaaacagacaaagtatgttcttcacaggagaggaaagaggaaagaggaaagaggaaagaggatgggatgggatgggtgatgaatggaggggggaagagaagaggaagagtagagagggaggtttgacaagggaagatgagagggaggagaaaaaagaaggaggaaggattttatatcagaagcctggcccgtccgactcccaattagggaaagtagcattatagcctcgcctactcccaatacagtacaacgatgacatggtgactgcgtattagacaatacctggagactgccaccttgaatcgacagctcatataggaattaaaatctgcattgtgaccaggccactaaattgacttgacttatactatcactatcatgccagcaggctgtctacatgtacacaaactccaagactggtggacggaggaaactatccatgtatgagttcgaatcaatattttgagaccaggaaaataacatgaaataaccataacgacatcgaaactcctggaatttgctaacagggaatatccaaatccaatatcaatccggtctcatcccatcaacacactaacaccgacagccacaagtagagtcgcgaaattcctagttcttttggttcctttttagatcagtgccatttttcctctggtcactcctatgtccggtttcagggataatatgggctggtcgggtggtacccgggtctgatctcaagagtataggcaaagtgtaaagagaagagaagaaaaagagaaaagaaaagagaaccacaggctatatagccagtgtgatagaagtagaggtagaaaaggcccactaccagtaatactggtgacaaaagagaaagggaaggaaaaaaagggggaaacggccggcatttgttggaagattgttcgagattgatcaaacgagagaagatgagtgacagaaaaaaaggaaatcgttggaaatgaaagtatgaaagtgcactggatcaaccgtagggaactggacttcatactgagaggtatcaacgttgcccgtacagacaaagccaagcaaggaattaagtaaccacatccacaagtaaaataatagtaataatagaaagaaaggaagagaagccaagaaaactcgtaggtcacagtgcactaatctcgaatacagaagagccccggccagaccaagcagtccctgctatcagttgaaggatgctggtttcctaggacgagcaagggaggggataggagaggatgcgatgaacaaggtacaccaacgccaatctcacgacagcacatgcgcagaaaacacatatccagataattgagagacaagaagaaaacataacaggtcgagtatccgcgaaaacgcactagagcaatgatcaaatgtacaaacaagggtatatcggaggtgaagcacctgaaggaccgttaagacttttacacgttcacaggccgtcaccagcacctgtttcaacaccatcggccgaataggacatgctgggatcgaacccaaatccagtagtgtcggcggcatccgtgttgaggaatgtgtcaaagtcaaagtgctccaggatgtttgggctttccagtgggccgaagtcgaggttgtatggcttgcatggagtcagtaaatgcatacttgtaggagacgaggtggaagaacatacatcaggaatactgaggtcagcgaaggattgctgttggtcagggggtggctgcaccatggtctgaggagcaggtgccgaggtcggctgtgatggttgagcttgcccgttcgctccattcgctccattcttgggattgaaagaattagggtgctgcggcgtgacgggggtcgatggagtcggtagctctgcagcttcggtggatggagttgcacctgcggctgcactggcagcagcagcagcagcttgcttcttgttaggtcgcttggatcaagttagcgaatgcaaagaccatagcaccaattgagagtatacaaaccttgcgggcgtccttggtttccttcttgcctttcggtgcagctttggtggcctgctgaggtgttggtggcgcgttcccagccgtctgcggtgacgctggctggccacgaccaacgttaggacccgtgacaggtggcgccgagggcggaggcatcgcgcttcgttcctgtggggtcccagcctggggctggttcgcaggtgaatgctgcggaggcatctgcggttgtcctggctgccattgtccactaggcatacgctggccggcattggccggaatcggctgacccatttgagctccagtgaaagcagggttagagctaggaggtcgcatattcgatccagggaagaactgagcccccatctctagtatcggaccaccgttgaggttcatggatccaggtgatccacgttgagacatgtcaccggcatttggcgacccgggaagtccagtcggaggtatcttgggcgtacctcgtttcatttggtcattaggattgggggatgtgcccgccctgctgcccggggaagcgcctggcggtaatattccttggccgggcatcgggggctggccgtcagaccgggcaatgctatcttgctcttgacgagccatcatcaagcggcgcttattctgctgttcaagcagcataagctgcatttgataatcttgaagagcatggttaccatgctgagtgccaggtgtctgtaaactaccgggtcggacctgggcgagttgaccgttcgcaccgtagtaatcaggaccaccagccataggatacattccttggccatccggcatcggcatcagatccgtctgattcgccattacaccgggattcatcatgccaccattcgggataccctgggaattcgatgctgagcgagagtgatgaagggccaagttttgagcatatacctgcatagatttctgttgcgcagcttgtccctggaactgctgaaattgggctggagtcattcccctctgcattccattctgcattccattctgcatcattatagcctgcgggttgggctgtccaggcattccttgtccctgtccacggccattcggtgccagctgctgtccgttgacagcgccttcaaggcgtgggcgtttcgacggcgaaggagcgttgtcggcagacgctggtgactgtggtcgatgtccacccatctccatatccggatcccgttgcatttgctgcatcatctgcaagtgctgggtcttttgatactgcgccagttgttgttgttgcgagctagaaataatctcatcagcacgtccacccccaactcaacagttcgcataggcaaggagatattcagatagagcatacagtccagtggtgttgttctgcagcactgttttctgcaggttaggaggcaccatgccattctgtctccggagctggttcatctggccgggcatcatgggttgctgcctcataaattgattgtgctgttgctctcgcagacgcataaagttctaaatttcaggattagtccatgatcaacatccccgaaggtgatcgactacgcacctggttgtgctgaagatattgcctaatatcactgctgtttcccttcttgcgttgagcccagaagaactcccaaaaaaggctgaaccaatcgaggaggaatgaggaggcactttcgttgggaagatttggacgagggagatcatctgggattttgatcttctcaccgtccttcccatcggtcatcatggcatcggggtccataccattgacatcaccatcacgccgatttccgggactcgtcttggggttgttgtcggtgttgagtttgatggattcatcttgcaagagagcgcgggcgcagtcatggtacccacgtttcaaaaagtaatcatagatatacgtgttgaggttgttgaccaagacttcggggttgttcatagcgccgtcgtttcgagaagccgtggatccgttgttgatcataggaactccacccacagggcccccagccccggggttcatcccgacgttcatttggttcatggtggcgaacggtgggactgcagccacccttgcctgcggtatcgtgagattttcaaatcggagatatgtaatttccgacgcgcgacctccgtttcaggctatcaagcctaacgcggggtgatagaagcgacgcgtggaaatggaggcggaagcaaagcgctgaccgctttcgaatgaatatccaagcctcgcaggctgagcaacgcgtgtgcgtaacggcgcaaaagaaacgggtatattatcgcagaatatgaggaatttcaagatcaccggtggcgtcttttcccgaagaaaccacgcgacagggtagaaacgagaggatggaggctcggaggcgcagatgtagtatgttcggtgtgtctctgactggagaaattgatgagcgcttgccagagcattaaacacttcaaacgaccaagtgcaagagtaagtgcgcagtctatacggggtggacgatgacggaggtacaaggaggcggaaaaagcgcacaagtgaggtggttggtatggggggcggcgccagacacccgatcgggcagaatcgcggataggagagtaccaaggccgtgtacaaagaaagagaaaacccaaggacaagaaacgaaaaaagggaacggattaagaatagaaaaggggagtctaagatatgtggatctcacagtgggaagatgaggacgggttcagtgagagagagccggggggacgtacattgacaggcgctgccctctgcgggagaatcgcttgttcggagcggatcaacctgatcggaggtcggggctggggatggcgctgtcaagcgtatttctgggaatgcaccgatctgataaccattgaatttgcggtcttcgacaaaggagaaacgggagtcaaggaattagcgaaatagaaatggggatagatatggaaatatggcgatttgaagagatcgagaagaataaaaaaaagggacgaaggaagggaaagtcagaagggtgatatgatacctgatgggccctgcgatggatcccagcgggagtctaaaaagtagggtaagccactatttcgcgaccaccacaaaggttagatatatcgaagatcgagcgatcgtagagaactgaacaaatcgattgaagaatcaattgctgtggaaaagtcgtgcctaggtagaggttgaagaaaagatggaaaggagggaaattcgatctgtaaagagttgaggggcggcggagatagtggtacggaaccggtatggcctcgcgtttgtgacatacagtacgtgacaaatacactgactcggatgttccgttgaccgctatttaggtgcccacgggaatttgtatgtactgagccgaactgcaggtttacgctgcaatacgtgtttggtaaaaaccatacagatcgagctcctgagcggcagattcgccaaggatctacacgtataaaaaagggaaaagggagatcatgcgatttcgatgaactgatcgcaacatgatctcaaaccttgccccaagcccggttctgctcagttcgaagttaactgtcagccccctatgccagtgataaatcgtgtggttcagcgcaggatacatcacaaagcctaatttgttgaaagacaggtgtacaaatagagtgattatcagaagcaataatgacgagtaagggcaaaatgaccaatccccctaaaaaagacataaccagtgaggaaccccagaacgcccattcttcaagtagtgtaaatgcacaagatctcacaaggtcattactcttcctccggtggcatctcatcctcgatgtatcgtacaagggagacccgcatctccgtggtatcatctccgcgtagcacgtcactgacaaagtgtgcctcgatctgcatttgaacctaaaagccgggtcagtgatcggacccgtaacaagggaacctaatccaattgaccacttaccatctccagggaccctcggaggacgccacacagaatgttagagaaccatagctcgtcctgagcccgcccatcatcgggaagctccacaaagtccgccaaagggttgtcttcaaaaataagggagaactgggtgttgtcactagtccagtttgtgactgtaggtgtgacgttcagaaagatcttgaagccaacctgatcggattgtcagccatcagagatacattgtctccatgtactaaagtaactcctaccttcgcgatcatatcagctgtctcccggaagttgacgcaacggccgacacctgacttggccaggaagtcttcaatgagtcgcattccaatattgtatcccatcttgtccaactgcttgttgacatcgtgatagttgctatcatagtcttggcataattgcgcgacaattgttccgtaggttaatgtgaccagctccgcgttgactttatcgactcttgttctgcgcatatgaagaaagccgattagttcggattcgaggacagggatatggcgaggtcaattgatcatcgctcttatatcccagtaagcgggcactagggcttactgacttccatattctgttcgaaggccattgattagtagaaggtccactggataaggcattgggagtccacctactcttctcctatccttgagttttttgtagacgacatcttcaggattatgctctgatagcccggcttgttggtaaaacagaaaaagaatgcggttcagatagccacaggtaaatgtgacagtgttgatcagggtgattgtggggagtccgtgattgttggagttgctgattgtacacggtcggggtacggcggacgaaactggccatgctaaactttgacttgattggtttctttcatccaccgccctctactccgccttataattgatagggatcttacctatgagtggggtaaattaccatgtcattttctgcccgacagaaataacccaagatgatcaagtctcaatggtcgctctcgtccgccggacacatccagctcaccgccgagcctaggtgggattatcgttattcccgcagcttctctgaacttttgctctccactgctttcgaggtcgcgattggtcaccaattaattctcctacctttccaaactcaccgaggtgcttgctgtgacaatgtctggtgaaaagcgccctgctccagagggcttcgggacctcgcaccagctcgtggtcaagcgaaacaaggccgccgaaaacgcaggaaccgagcttgtgaagggctcttcccaaaatggagctctcattcaatctgtatgcgccaagtctgccttcgaagctcaacgggctttcacggagaatagccagctaattttaatatacaggttcctcgcacaagtggtttggatgctcctatcatggaactcacaggtaagactctgtcgccaatttgtcgctataacacgcgctaataaaaggaacctactaggtcactctggtgaagtctttgcagtccgattcgatcctaccgcgcaacatatcgcatctggatccatggatcgttctatctgtatgtcctcgtcttgatccgggaatgcggccgccgaatacgttactgatggagattccttgaatagtactgtggaatacatatggacaatgcgaaaactacggccaattgacaggtcaccgaggagctgtgctggatcttcagtggtcgcgcgattcgcgggcactattctcagcatccgcagacatgacccttggaagctgggatgtggagaccggagaacgagtacgccgtcacgtggggcatgaggagatcatcaactgcctcgatatcagcaaaagaggacaggaacttttggtcagtggtagtgatgatgggtccatcggcatctgggatcctcggcagaaggatgctctggactacctccagaccgaactccccattaccgctgtagcattgtccgaagcgggtaatgagatctacagtggaggtattgacaatacaattcacgcctgggatattcggaagaaggccatagtctactcgatggccggacatacagataccatcacatcactacaaatctcgccagactcacagactttgctgtcaaactctcatgactccactgttcgcacatgggacattcgtcccttcgcccctaccaaccggcaagtgaagacctacgatggtgctcctgtcgggctagagaagaacctcatccgtgccagctgggatcccaagggtgagaagattgctgcaggcagtggtgatcgaagtgtggtcgtctgggagaccaaaactggtaaattgctgtataagcttcccggtcacaagggcactgtcaatgacgtgcgcttctctcccaatgatgagccaatcagtgagtatataccctgtttgcaagcaaatccacaatttctaacaaggtcacagtcgtttcttgctcctccgaccggaacctgatgcttggagagcttggcaaataaacatatatgataggtattaatgttttaatgaagatcagcgggcgtcgaattcattttttcaaacatgccatgtgcatccgttcccgatctagacgcggagaacggtcttattatcagagcttccagaggtcatgacttgtccggctattcatctggatctatgaattgtacaacaagaaccaaagtccaaaaatgctgctcttgaatatctctggttatctacaagaacattcttatgtggcctttgtattaggctgaccttggaatattttcattcattgtagacccgtggacgactacatgtatgcctttttccaatctctttgggcaaacgacgtaggtaaacctatcacgatctcctcccaatgcaccagattctcgacgagtctgcagaaactccttccccttggcacctcatcccaaaggctacagggaaaatggttcgcacgctgtggtacctgccatctagttttgtttcctctgtctccagtaaggcaagtgatgagtgtggtattgtcattttggcgactggtttaatccgtgtgtcttagttatacgagctttatttctaacatctgcaacgtagtccagcctacgctgtcatcctaggaccagcggaccgtggcttggatatttctctatcattgaagcattctgacgacttccatatctctgggcacagagagaactccatttcagcgcatcttctgctttacgtatatctatatggcatgagcaactcggttggtgagaaaatgatggtctcaagctggcctctcatgttgacgtcgcttaatcccaaatatacctgttgcatgtcttcttagggtctacctctgaaactacaatatcactgcatattctatagctaagtatagctggtatccatatctatatggtttatagtaggatagcacttgaagttcactccgtagagtaagactcaaaatgtaaatagacaaaaaggtatctaaattcaagatcgatcagtagactaattttataaacattccaaccttctacaagttgtatagacagtaactatagcatgcaagaagatgatgcaataagcgggaaaaaaacattccccagaggcttatctggccgaatcccccaacttcccactccactcgaacaagccgagggtgatcaccctattaaaccagtctcttttcagagaggcctgaaatagaaggccatctggcgccctatccatgatccctacggcgctcaggtctgctcgaagcgcacgcgacggaggcgatgttcaacctccgctccgcctacatggtggtctgggccatcctgttatggctcaccgtcgctcatggcatgcgagacagcctagtcaaagaactaaggtataatatatgctacccctggtcatctccgaaagccatctaaatccactaatacgcccctgtccttccgcagacaagaaactgagcgtatgttcttccatggcttcgagaactacctccaatacgcgtttcccgaagacgaattacgcgccctgacatgcggccctcttgttcgcgacgagaagaatccggagaataatgacgtgcttgggaattattctctgaccttgattgacagcttatcgacgctggccatcctatcctcgagcccggacagtggggagcaagccttggcacatttccaggatggtgtcgagagctttgttagactttatggtgatggctcggatggccctgctggtcagggtgaaaggtcgaggggatttgatctggatagcaaggtacaattgtttgaaactgtgattcggggactgggtatgttttcttttccctcccagcttattgatttgttgcatatgctcgatttccggcttttgtgtcctactgctaacttattccaggcggattgctcagtgcccatcttttcgccgtcggcgagctacccatcaccggatacgagccatcagaacgggaagtggcattcgctagcgcatgggataaaagcatgtttatgaaaagtgaccacggaattcaatggagcaatggctttgtctatgatggccaactgcttcggcttgctgtggatctggcccagcgattactccccgcattctatacggagactggtcttccctaccctcgggtcaacctgcgccacgggattccattctacgagaatgcgcctttaaatctcaaggtccgagattccgagggcaaacgcaaatcaaaaacggcggcatctgagccggctgagacttgtagcgccggtgcaggcagtctagtccttgaactgaccgttttgagccgactcaccggtgatgggcgatatgaggacttaggcaagagggcattttgggcagtctggaaccgccggagtgacatcggactgcttggatttggcattgatgtcgagtcggggaaatgggtgggaccatgggccggagtaagcacgattcttttgacaggtacaagcttagactaattggaagtagatcggcgccggcattgacagcttctacgagtatgccgtcaagacgtatgttctcctgtccgagggcgagcgtgtgcctttcgactccgacagcccttgggcagcattagactcgtactatgctcctctgacagactatcagcataccgccgatgccttccgacaagtttgggaagaatcgcataccgcgatcaatcgccacctattccgaggcgaaggttatcaacatccccatcttattgtaggggatgtggtcactggtgccacgcgggctttctggatcgatagcttgagcgctttctatccaggggttcttgccttggatggaaagctagatgaagctatccagattcatcttctgactaccgcaatctggacacgctactcgggcattcctgaacgatggaacgtggctactggtgacatcgataacggtatgccgtggtatggaggtcggcccgagttcatcgagtccaactactacatttatcgtgcaacccaagatccgtggtatctgcatgttggagagatggttctcagtgacctcaagcggcgttgctggaccaagtgtggttgggctggcattcggaatgttctgactggtgagctcattgaccggatggagagtttcttcattggggagacagccaaatacctatatctgctgtttgaccgggaccatccattgaacaagatcgatgccccctgggtttttaacaccgaaggccaccctcttatcatcccaagaaaaccggcatccgcggctcgccagcagcgaaccccatctcaaggccaggacatggccggcggagtatgtcaaattataccctctccattcttcggcgtgtcttccactgcatcccgaacagacatctttcatgctgccaacttggcacgcctggatctaatgcctgatcgaggagtggccgcaggtcctattttggaagactcgcctggacatcaaagtgtctttgtgtctgatctttcctcgccaaccaattacacattctacccgtggaccctgccacctcagctggtcccattcaacggcaccagcgcgcctatggccgttcggcccacgctcgacatttcattcccgtcacttccaggcggcgtaaacatgggacctggagcgttggaacgtgtccgagatggggtacttgtaaaaacaattggaggcctccgactaagtctggttcaggacgtacggttggaacccccgacggccacgactggggatgaggaagatgggtaccgggtgcaggtgatcaacaatgtgccattaggcaaagatgagaaggtatatctctctcgccaaatcacctttgatgtcgtcgatccctatgatccgaacttcacccgtgttcgcgacaatgccatgcttgacctcgtcattgacgttctcccagagccctctcgccgacgtaatgattcggctcatccacgagatgaaaattctcaaccagaaaatccacacccgccagaaccccgtctcggaggccacagcctcgcctcttctgtcgacgatgccgcaattgttgactccccggactcaacagtaagagccatgctgtcgtctctgatgcactcggtgtcatctttgcttcataccgaaaggaccgaacctgctccactcaggttgagtctccccgctgctatctctacaggcatcgggtccagcccgcttcccgatattgaagatgcagttaccatgtccttgctcggcggcccatctacagaccgcctgtcgtggtcaagtatatacttcgcgggcgagctctgcgacgagcgaattctccgtgatgtcgcccataaccacgaagtgctcgttatcaaacgtggcggctgcaccttctcagaaaagctccgcaatatccccgcataccgaccaacgcgatccgcgttgaagctaattgtcgtcgtctcatacgacgacattccaccacgcagcttccgcgagcagaagaaagagccaacgaatcaatccgggtctcgctctgccctcgccgctgtccgtgccgaatcgactctcgtccgtccacacctcgacgaagcgcaaatgacagccagtggcattccacgaaattacctcatcagcatggtcatggtcggcggcggagatgaaacatacgagctcctgcgccatgcaagcggcatcggagtcaagaggcgatatagcatgcgctctcgcggcgtcccgatcacgaatttacacattgtttgaatattcatcagatatactataccctattggaagactgtcggatcatttgtggcgtgtttgttttatgtttcgcagatatgcataattttagacttgaatatagtcaaacccagtttcacagagaattgaactggatgcatttggtgataatctacattcaaagtctcgacttactctccatctcaacctgaagcttcctccaagagtcaaccgccctcttagccgccgtctcaggactaatctgcccatccgtcatggtccgatggaaagtctccatagaaatccacccctcaaacccaacatcaacaatccacgccctagcaatatccacaacgggcaaataccccccaaactcaacctccaaagggaaaggcctggcatgcttcgaccaggtaaactccttcgcctcaccgggcagcgcccacggatgcgccaacgaataaggcggatcaaaccgctcggcatcagaaagctgcacatagaaaatcttctcccgcggacaatcgcgcacaaacctgcgcagcgaatcccgcagcttagtatccgcatccatctgcagtccgttcggagaggaattatcgccccacacacgagtcccttcgtggaaggtatccagacacagtccgaagttcggacggtcgacccgctgcacggtcgacagggcgtcttcccaggtggagcagtttgttccccatgacagcggctcgtaggcgattgatattactggcttgctggcgctggctaggtcggctagctgctggaggtcggatatgattgttttctcatcgcggctgcagtctgatgtgaagactgatggcacttgcaggtaggttgcgtgtagcagacgggcaatttcgagccagtgtgaggcgagagcgagcctttcttttagcggggttgttgcgccttcgtagttttcgaagggggctagggagaggacttcgacgtttgtttcctggcacagggcgtagatcttttgagctgcgtcgtggatggaaatgttttgggctttgctgtaggcgaggaggtcgttgtacactatttcaagtcctgcgatgccggcttgggatgcggcgcggattttctggtcgaggaggtggcctgggtattggctcagggagatactggcgattgctagtttattggacaccattttgaagtttttttcaggaattgatattaaaacgttgacttgcttctatgaccgaactgatatatcgaattagggcggaactcggtttccggtatgtggaggattcgcaaatcgccaaccccgcaattggccattgagttattctagtcaggcattgggtggatgtatttatcggtcattaatgaccgaaagtgtgaaatagttgatcatcgccttgcaagagttgtcggttggaactagaaatccgggtacttaagccgatactgggataactacgatatgttggaatatatcttcaagctcgcaagcagcaaatatacaatacaaatttgatatagccattgattcatatctagcaaatacgtcaataacaaattcaactgcgatcatctcccataacccaaacccctcacaatatgaggctctgtctctatcaaagtttcacccccacgcagagtagtccaatcccgcctctatgaagaattgtctaagccacttattaatcctttcgtgtggacagataccactcttcacgccagacaatccctttgagaaatcgaaagtgtaggtatttctcacatgcaaagacctggactcggaacttgaaagccctctggtggattccttatatagtctcgtttcgattgcgacttttgcataaggatgactggtgacttcacaccggtgccagacactgaacgcgtaagaaggataaaggaaccctaggcggcatagtctttcgtgatcgttgcaagagatcgtagccgacaagggttcccggtctttgaatgcgattctgagacagggacatatatcggctaaccccgcatagggcacgcagatcacgccaccattgagtaagccacacctgcagcaattagttactctctttggggtgtttggggggtttgaatgcggagcttcggtgtagattcatacacatcacgcagcatttccagcgtttgtcttcgagttgtcgtagaagctggattcgagggttttttcggagctcgatgttgcggtatatcaatcgacgcccttctctcaggaccagaagtttcgcatggtctgggtctttggcctgaaggaataagacaaagaaggtatagagatctttataagtcagtgcaaggtagatttgctctagcgcggagagatggggagaaatacagacatatgaaggagggagatagagctatcaccatttgatatggaacgtggagcttgcgtttatgagataggtaacactaaatattgtacatagggcttaggcagtgaattctcgaagcaagactaatatatttcatagggaaactagcatatcaaggttatacataggaaagtcgttttcccttctgccatctacatagaaaaggatatctagaaaaaagactaaaaaggctaccataaggccaactagatctctcgtttgtaccctatcgagtaaaaagcaacctacggcaagcctataacatcgggatttggcctttaacatagttaccaagtgagtaaaaggaaagacgtgatggagatgggttccacttcatgtctccaaattcttgtagaactgaacggtaatatcaaccccccgcaatcggggctaagtatgtggtcatttactgtgaactctcttctctcctcccttcaacatataattgcacataacaataaccagcagctcatcaccatcaccaccagaaacaatgctccccaacccaaccacccttcaaccagcagaaagacacacccaagccccaatacctaccccaccaactacaaaaccaccccaatacccaaaatacctctacttcgcctacggctccaacctctccccagcccaaatgaaaacccgctgccgcataaatcctacccactccgctaccccactagcaatcgcagccctcccacactggcgctggctaatctgcgaagcgggctacgcaaacatcctgccaccacccggtctgcgcgttgcaaaccaagactccgagaccgcacataagattcccgtttccgggtccgaggataccgtctacggcgttctttaccagatggatgttggtgatgagcggattctggatggctatgagggggttgatacacgtgctgctgatgcggaggctggggatggtgtgtccgtttctattaggcccagggtgcagggcgatgggtcttataataagtggtttgttggagcggatgttgtgaaatggctggatggggcggaggggatcaaggcggggcttggggatggaaaggggaaggggaaggtgccggttttggtttatgttgatgagaactgtgttaggctttctgagcccaagtttgagtatatcgcgagaatgaatcgggctattcgggagtctgtggatttgggggttcctgtgggatgggtggaggaggttatgaggaagttcattcctgtggagtgaaatggtatagatttagatttagatttgagattgatcgatagattgataagatggatgtatttgatcatatcaatcattggccaggtccaattcctatagagctactctattaaaataagatgtaattagccagtgactgcaatctatacacaatcaagtcgcattgataaagctatttgtctatatttgggtattatccggccgggagctgcgccagccgtggcgggtgccgtcgaccagcgaaacgaacctccagactccaagttcgagtaaattgtttgattgggcggcccgggaggagcggatggtaaaacgctcaccgcaagatcgggtgtggtcgggcttttgaaaagattgggtcattataatcggcagtcgagatcgtcgcagaaagaatgattttttggggagcggtgtgtagaattaagcctggccagagaggagagtgtgaaccggcgcggggagcttgtcgcgtccgtgaaggaactccagctcgaggaggaagatgaaaccgaggacctcgccgcccatcttctggatcagctcaccggcggccttagcagagccacctaagaatagctattagtatgaagtatccaccgatggattcttgtcacataccagtagcgataatgtcatcaatgacgaggaccttctggccgggcttgatagaatcggcctgcatctggaagaaatcctggccatactccttttcgtatccctgagtctcacaaggaccggggagcttgccctgcttgcgcacggggacgaagctggcacccaggcgcagtgccaggctaggacccatcaggaagccacgggcctcgagaccgacaatgacatcgggcttctggttaccgtagttggcggcgacgtgaagttccagggagcgaatcagggcctcatgcagggaggggtcggcgaagatgggcaggatatcctcgaacaagattcccggagaggggaaatccgggaactggcgcagggcggcgcgcagtcttaccgtaagactggcgagttcggcggcgctggtggcatcggaggcggggagtccgactttggaggcatctgggagcgtggaggacattatgagagagaagagaagaaagaagaggggaaagaggagagggttggaggtaaaagggttaaaaaagaaaaagcccaaaaaacctttggaggggaaaaaaagaggaaatggtaaaattacagttgataagccgataatgggggggtttcgtgcccctcacagggcctagatcgttacttgttttttattttgatcttttttatatagaaactagatgttatatatatgtctatttggtttataacactagaatataccttatatgatctctatagtaaatgttggcatatccttctatcaaactacgggttctatacttccaggtacacaaaaatcagcggtcagatcccgccactaaggtaacttactgtcacgcaatggcatattattcttcttctagaaggtaagactactgtactactagtatacttactttactcgtacaaggggttggatatgggcccggcttggatctgcgagaccctaattgattatcccgtaaacctagtgctcagtcctctcgtcgccagggcacgaattgtgttggactaataccactcgatcgtcatccctgacaccgtgttccggttccccagtagcctagaccgttggactgcgacctagactttatggttactttgaaggtcccgaggtccaggggaggacagaaggcagggctgaactagggctaagaccgccagactaccaagggatcatcataaatgactcatggctccttgaccagactggagctttagaatcgcattggatcagaccatctcaccggatatgcgccgtatggccagccttgacacatcgtacggccatttcacctagccctagccaataggatctctcgcgccacgacgtgatctgaaactcatcacaatggctttactggaaagagacatgcgtgctgcatagcgggatgtctgttgtgcagatggtggggggatttgtccgttgtctgctccgcccctcgctttgactaggggaaaggaacaaaagtacgaggtaaaataaaacagaggaagtgcaggttactgtatactataggtcaaaaaggaaaaagggcaaaaaagaaatctcaggtttggttttaggaatagccgaacgcgggggtcgaacccgcagccttaagattaagagtcttacgctctaccgattgagctagcccggccgggctgttgaagagagcagcgaaacagtgctccatggacggaaacaaggtctttggtagaatatagacatgcaggtggcggtcttagcgcatcctgcagcccgttgagaagcataactgtatatgacactgtcatatagggttgtataactacttgaatgctattttaatttgattatactgtacctggtgttggtacatttgatggcaacgcaaacctcttcaataatctcttgtcagaaaatcatccgacatatataattaccctccccacactatcattccctctttccttccctaaggtgacggcgaaataatgctacataagactaaacagtaggagttcgaaattaatatagtcaaattgtgtttatttagctggaattattgggaaatataattgcaaaagatatatcaatctccaattgagcgtcgatctttcgaatctacaccaagtacagaataatatcccttagatacctcctaggtgagcagttgactgtccacagttatactttacttgacactataaattccatcatccaaagtcactcatagcctttatgttgtcacctatatgtacctgcatgtacctgcgtataccctatgcagtaatgctacatatacgtcccatgttgtacatcaaagtatactcggcggcccaagcctaaaacgggatagcccctcacatgaccagcacggaccacctcgcttcaagtttttccgttgtctccccatcgctataaatccgtcggtttccttcctttccatctcatgcttttaaagattgggagcctcaacaggccacttcgatttcagatgaattttttctgataccttgtaataaattcactcatgtcacccgccgtgattaccgagatgcagccggatctgcatcatgaccagctcgaggccgtgggcaaagccttcgatgcactcctactaaccgtgtatcggctgactcacagacaaaatgagctgttacagcacatggataatgtcttcaaagaggtaaattcacttctctcctcccttatgcttctgcatcctggtctcgcatgacgaagaaaagctctagatcaggagtcacttttgtggcgatgacggattaacatgtattatctgattgagaccatgactgccttgctgttatgcatttgacaagatgaacattgctaactttgtatcttgcagtacacagatgtgatagaaattctgcctcctcaagatagacatcgtgcatttgacgttcaaaacaagttgctcgctcagcaagaagaataccatcagggtctcgtacacagcaagcctcaagttatggaacaaccgttgaattccatggatgtaatcaagaccctcgttgcacatcaaaatgtagacgaaaatactttctccgctatcaagaatggagtcaaagggtgcaaatctctactccgttcccaagatagcctctcccaaatatcctccaactcgtgcatcctcgcgcaagcaccggctccagcaatcgcgctggagaaggacttcacaacgaatggcacccagggaaatctccactgccctttctcgaaaccgaataagatgcagagcacaaatggcagtgaggcccccagcgggaaaaactctgcgccgaagatccagatcgaagcttgcggccacgagcatctggaccccatcagggcggaactcgaagaacgacgctctagccacacaccatcagccccgtcatcaaagggaggatgccccgtctcccgatgccccatccgattcctcgatcagcactccccggaagaaatcgccgaatatgttgaacgacacaaacatgagatccctcgcagccacgctatttgtgtcaagcgctatcagcgaagcccgcaggatatgagacaactggacgccaaatacggcggcctgaccagcatgatcgctggcctaggtgtgaagcaccaagccttcctgccggaatgtaataccaatggtgaagcccgttcctcgcattctgcgtcgagtgaacgtgttgagaaatgggccgagaacgtggacctcagtacgcccattgtgcagaacgaggaaaacgaagagaagaacgaggagaataagaacgaggatgataaccgccagagtcactttgaccgccccctgcgtgaagtccgcgtgggtgaatccccgagcaggccttggggtatttcagtgcctgtcacacatttacctcctatctcagcgccggtctctggttcatctatcccaacgtcccccgaccctcaagccgacatacctgataaacccaccgatgccgaagtccttgctaagcctgccggtggctgtccattcggccacggtaaaccaaagcctgaagcagcaaagcccgaaatcgaaccacctcggactggggaaagtcctaaggacaatgatattacttcaccaaagaaatctggttgtccattcggccacaataaaccaaaagccgaagttctaaagcctgataccgaggccccctggaacggtgactggcccaagacctggcccaaggaccaggctgtcgcagatcgagtacctgcaccccaggcccatgtttccccaactgctcctgctcctgcgagcgaggactcgactacgaaacctggcattccctcaacattctcacccccctcccacgtcaccttcaatggccctgtcttcttcgggtactccgccgaagagactgccaaactattgcagcagttcggcaacctgggcaaatcatgaccgcgaagaaacttctttgtatagtatgaccatggaaggcgcaagcttttaacgcatcacgacgaaacgacttaatttttttagcaagcattgtcgttgtattacccaattgaacttgatttgatataaatttcaatccattttccgtaacagctttaataacaaaattcacaatgtaaaataaatgaatgacttcatcggagagcgtcgacgctccccgagggaaactcgcagagcggggcaccttcgtatcatcgcgaccttcataacttcctctctccccgatgctgcgaactacttctcgtcttctatctctatctcgaatcctccgtccttcaattccagtcagacctcaattctcttctcccataatgtctgccaacatgtccatcatctcctctaaggatgcctgccctcgtgagtcaagccccgccaactatggctcctcacctgcctcctagacagagaaaacagactcaattccagaaaaaaagaatcaaagaaaacaaagagcaatagctaactcacacatccttagctgccggcccttacgtacgtcgtccttccctctatctgcctccgcagctcaatctaccttgagagctagctacccctccacaccggaccaatctactccaaaacaccatttccacacctacacatattgtaaagactataagtgaaccatctaacaaacccaactacagtcccaggccatccgcgccaatggtcagatcttcgtctccggccagatccccgccgactcctccgccaacttggtcgagggcaacatcggtgcccagacacaggtttgctgcgataacatcaaggctatcctgaccgccgctggctctagcgtggacaagatcgtcaaggtcaatgtatgtgtttccctccaggctttgttactgtggtgtttctggactcggctttgctagggagaagtatacacaagatatgagaaggaggacgctttgctgatctttattcttttctcaggtcttcctgactgacatggccaacttcgctgagatgaatgctacttatgagaagttcttcgtccacaagcctgctcgtagctgtgttgctgttcaccagctgcccaagggtgtgcctgttgagattgagtgcattgctctggagtagatttgagaatctatttagttttggtcttacttctactcgagccatgaaaacaaatataaagacagtttagtataagaataaaaatgagaatgaattcgatcgaattatgttgcgaaaatcctcggggatatcttcatcttgattatttccatttccgatcccgtttctctcgaggaacatacatgcgcgagtacaagcagatgccaaattgggaatcataagagtcaagggttcatgcgtcatgacacagaatgcaagagacgaaggaaatggagaatagggaagcaaaaacacacaacattactggcttgatggatgaaaaaaaaaataagaaacataaacgtcaaaaggtaggaggggagagcttgatagacaagtgcacattcaccggccacgggacatgataccgctcatgcggcttccggcaccggccatcaggctctgtttcacgatagcatcggcggcggcggcggcagcaagtctttccttctgacggctacggtcgcggagatagccggcagcttcggggcgcatgcgaagaatgcgcaggatcatgtcgtcgttcggatcagcctgcgcctcccgtcgcttctcttccttggccttcttcatcgtgcctaggttgcgggaaagcatgatgctcttggcgcgacgggcagcaggaagaccaaagctgccgtagccggcacctgtggcgccgagatgaggaggtgcagaagtgcggttgcgggccgcttgttggcggttgacggtcgccgaggccatgcgttcggaggtgcggataaggtgctccgttggttcgaagtagaagaaattcactgactgaatttcgtggtatttgggcgatttcaggatatcgattgggacgccgtttgcttcgccggtttcgtcgtcaaccgcatggaagaagttcaatagtagcacgagccagcgtgatacgatgtcgacttcttggattgttaatggcttctgatgggagggtttatccgacaggggcggtacaagtagactctcgatagtagcgagcacttccttccataggcgagccatcaccatcttcatggcttctggtgtgagggttttgttcatgatggcgaagttgtcgttgaaataattgaacagaggagtcagtgcattttcgacatctgccggagtgggtccggcaggagctggctgtgctcgattgcgatttaagaagctcgagacactagatatactgattccgcgagagagcaaagacttcagtgttctccgggaaagacagtgactgatgtatgacgaaagcttctctgtgatctttcgagtcatatccctttccgttcgtttgagtgtacggaaagccttcccgaagtagaactggatgtcgtctcgctcgccttccatgctaactcggagcagaagccgaccctgggtatccaggtcgagccaatactcccttggcaagaagtcactaaagtgcacaggatctagcttgatcgacgtgcggccaacgtagtcgtgatcgcccactgcgtcccagtcccagatggtggcgataatgttcagagggccctgtgtggtgagatctactgcatcctcccatcggggattaagattgttgtagatgattcgggttttagcaattcgtttctgatactcgtccgtcaatacgacatatggatcgctgccaccaccaaggtcgcatgctttcaagtcctctgcctccactaccttgattgtaaagacataggtagtagacttgcggaccttcttaagctgcggtggagtattccttgcaatgacttcggcgcacgcgtcgacgttgatgtccttttcgagtttgtcgagctgagcaagtgcatactcaatattgttcagtttcacaagggactatggataatcttagccgcgatattttacccagttgaaatgaataagaacatacctcagaggagaattggaagggctcaattttatccttattcgtccaggtgtcttttgcgaactgcatcagtttttcctgggtggtttgattcaatgctgcctcctgctcgggagtaagacgatccatttcctgcgtgaacatcttctccaaggagtcacagtatgtcgccacacctttcccaattgaattagagagatgcgtcatgaacttcgcatattgaagatcatcgtcccactctagttgcaccatactttcaataacttggttgaaagatcggaaaatgtcaatgactgacacactgtgacgatcgtcttcaggcgcaagctctgttgttccacctgaacgaatggcaaatacatcttgttttgtagcttcgctgacccaatccatgatcttttgatcagtcagacgaagccatctccagacgaagtcctgaaggagactttccacatggaatgggaatggagcactgagctaagttagtaatttcacagaaatagcaggggagtccaggggcttactcctcatgggtgttatggaataaccgtctgatagtagcgaactgtttgtatagatcgaagccgtcgtcaattgcgatctcctcacccctcgcttttgcctgctcgataatcctaataaccatttcatgtgcatcctcggcgaacatagggaggacgttttggcacaaggtggtaaaggggttcacactaattgtaagttaggaactgatcagccaaacagacgggaaagagcgggaaagaggaacccaccccataatctccggatttttgcggtagcgtttttgaatctttagcgcaagttttgagattgcatctccaagttgaatgacatggtcaggatcccaggcctcttgttccacagggattatttcgctaagaaggctttgatactttgttgttgccttttcagcaagtccctcttgcacgtaagtgctgaaacgattgatgtcttcagggtcctcaatgtagttgggatccatctggatgtgggtgtcaagaatgtacataaccgggccgagtgggcgtggctttgcctcaaagcagtccatcatagcctcatatagctctcggagcaaagcctcatgaagtttagacagcagcatttgcatcgtttgaagatcctggatagtccatcgttgtcgatcaaaaaccgtggaagccacaaagctactgcgtctgcggttctcgcccgaaggcatttctttcacaaaagtaaatgccgagtcaagggtagtgagatcgatttcattatcgacaaatttagcctgaaccacctcaaggaacaacacgacccgggaaaaggctggaatccgccagcggagacatatctcattaagcagttccgtagactgcttcgatagcagtttcattgaagggacgtcagatgtagcctgcgtagcctcaagctcccggtcccgcagatcatgggtcaaagtctgagacaagatgtatttgtacaaagacctagggtcagacgggatgaatgtgtatgtatcggattcgtccgactcttcaagagaaagcccagtcaaatcaataggttgatcaatgacataagatgttctgtcagtccgaccagacgttgttcttgacaggtcgaggttttcgtggggactcgaattgaactgaggaatggatccgggagtgcttttggctaactcggggttggattgcatgattgcaagcatcatctgtgagagatcagggccttcgctctttttccagctatcataaccctcgtccgactcaaaatcatcccttgacaatgttttgtgtgtctgaaggtttaggtgggcttgataggtcttaaggtcctgcagggcggccttttcagtccaggcggacttgtacttatcgatttcggattgtgcctgggatgtggtcatcccaaagattttggccacatgttgcaccaggggcatatccttcacatcataactcaatgcgccaacactctccgtggtagatgtaggtccgttcgtttgcatgaggtcctgatcttgcaggagaagcttgttttctagcaccgtcaatcggttggccaattctgggcggtccttggaccactcgtgatctttcagggtgagcgcaaggagtcgaacaaaaagcgcaacgtgccgatcaaccatgagcttccagctgtcatcgtcttgctctttgcccttgcccagctctttgactgcgttggagtagaaaatcaggagcagatcttcagctcgtcggtccttctccatgcgttttcgaaaggaggcctccttcaggacgttgagaaagacagcgaatgtccgcaccaccaggtgatcttgatattccttccttttctccttccccatcaacactccagtcaaccgcttctccagctcggccacgaagccatggggaaccctggtgcttttcgagtctctgaccaaggagaaatcgctcattaaatcatgaatagaggtggctgatcgttttggccgcgccggcgcgacgggggcattctggatgcgacgagagcgagggtggaggagataggcaaggtaggcgacccgaatggcatggctgtatgccacgttggcatttacggggcggcgcctggatacagaggagttgcgcgaatggcgaccctcattttgaaggctgttaatccgtcggttgactcctcgggattgggtagatgctgtcgacatggagttgtcaattaaatccgtgaaacgttaggaggtgacagatagcgggggaccatggagaaagttgggaagcacttagcacccagaagaagcttttaaaagattcttttctttcagtccaaagtgaaaggccgccacaaagctgaggggtgaattgtttattgaagggggcgagtgagggggggaggtgaaacaaaaagctgccgaacgactgacgtacataggcatataggcagtcccgtcccaaaacaatgctatgtctcctctgactattctatgaggttattatggtaattttcttatttttcttttatatgcaagtgcttattgcatattgctagttcaaggaaacttgatccttgttctccctggatggggccacacttataacgctgcaagggtttccttgttatttgggaatatcaatattgacatcaagtcaaaagttacatctgaacagatatcaaggacaaggatatgcaaaagacatttaatttaaaaagacaaccccaaaggacatcatagtgttatctgaatataaagtccacaatgtcaaatgaatttcaatgcgatatatcgacccatacgacaaacacaaaagtgggttttaaaccaaattcattccgagcatgcgagcatgcggccggccttttcggggtttgatgaaacataggactggtgaatcgaccaccagtcctcaaagacgccgaagatagaaaatcgtactggtatttacacaaataaaaagagaaaccaggtctcaatcaccacttatcgccggacttgtgggcctaaatcaactggttagctctttgcccatgtaaaaggttcttgggatatcatgtccggtacatacaggcacagcattgggacctcccaactccttttccagaccatcgacgtaggccttaggaacactcggcttgtcagggtaggtaaggctgacaacaccaaccatgctaaagaaaacagcgacgaagcatccgaggtggaagaaacccttgccggccgagacgtggttgtattgctcgggactgaagacaccgaggatttcgttatcctcgtgcacgggttcgccgaagttgcgcttctcttgcgcatcccaccagccaccgtaggggtctctgtgtgcccgcttcaaagggggagggttggggtagttgttattctgttttgggggttaggttcccggatgccaagtagggaaacggcatctctgccatatggatgctatacctgtagagccatgtcatcctcaatagcacggagagctgggacctgggagaaagatgcgcggggagcaatagctcgcacggcaacttggggcaggcgccgggccaagatccgttgagacaacatctaagagaggaattggaggttagaaaggctggtacgtaattgaagaagataatatggatctaaagaaagagactcacagttatgctgaaagacaagcagcaaatcagttgtcagaaggcaagagagccaattgggtagagggggttgaatatcgatgatgaacggatggaggtttgcggaatgttgtggcctgaggcagacagtcacaagacttcaggcatccacgcgccggcgcgaccatgtaattgctcgcccgaaggaaaaaaaccactctccacgtattctcatcatctccgttgtttttccgtccccatccacgccacagcgccgataagcatgttaaacttcgtgtagtatctctactcgatagtccctatttgctgatgccaaaatcttttacgtcgactgcgtcattgttgggatagctggggtcacctgccgccaacggcccctgtcgtctgcgggtacaagtcatgcaaaacggcacctccaacggcccatcaccccaagatgaacgcgtaacgcctgtgtccgattccacacccctcaatgggtctgtaaatgaaaacctgtcagattccgccccccgcgaatcgattccttccgacccgaaagacgtcgaagctgttcatcaacccgaagaacccccatcgaagaaacgaagactcacggattcctcctcatcgcaacgttccactcccagaccaccatcgcctccttggaaaaaggctggctttgagggccccacatctttcctctctgaaggcaaacgtaggtcttcgcgaacgaacgctgtcccggtcgaattccaacctgggtcggagaagagacacacgcgggggattcagaacaagaatgttggcaggtccgctcgcgatggaagcaagccggctgcatcctcgccgctatcggtaacacagtcacgagccgacgtcaatggaaaatcgggtggaaaggccactgcaaatggatcgcctaggacggcgtcgcgcgcgacggccaacaagccgtcgcgtatctcacaaactccagcgccaaaaccaagtcattcacacaccaaatctcgcatctccgttaccattcctcgcccgtctggcgccaacgcgaacggcaccagctctcgctcgcttcgcgatcgcccatctctttcgaatgtatccaaggaggtcaatgtggattcaggtgaagtcaatatgaatgacaaggaaccggaacaaggaccagtgaaaattccaaaattgcgcattaaattgagcaagcccgttcttcctattcgacaccctggccacataccgcagaagaaacacacttctttcagagaatgggtataccaaaacgatacctcaaatatattgtcagaggacgaggctgcggtagaggcacgcaagagacatgaagttatgactgctgctgagcccggtggaccgttgagctcgcaagtctgctcggcatacatcacagaacagcaagaggaacctcccccacagtactcgcaccaggatcacttggtttcccacgcactatatttccagaagctcctcgacaaagaacacaaacgccaccggcaaacagccaaactgtttgcgcagtggtgtgctgacgcttatcggaaacgtcacaaggaccccgaagatattctacgcgagcaacaggaggagatgcgtggaaagcgcaagcagctatcaaaggatcttcagaagatgttcgacttgacccgtgccgatattgatcgggtccgcctagcacgctgggaagaagagcggaaaatggaagaccagcaggctcttgatcgcgctatcaaaaagtctactatgctcttcgagaagcgtcgatcggagattttgggtgaattgcctagcgatgctcttgtgacgagtgacgatgaggatggtgtatcaggcttctcatctggccccgacgaagaagacgagagtaacatgtcagattctgaatccggaaccgacgacgaggctaatgtggatgatgatgccaaattgactgcggaagagctccggctgaagtacgctaacttaccggctgacgactataccgaccggatgtctgtagcctcaggcagtacagcaatgaccaatcctaacgactccttggatcctgaatctcttttagacggcctcgattcacacctcaccccggaagataatcagttagacgatgttgattcagtgttgatggatgatagtgatgcctccacagatatggatgatgatatgggtgatagcgatgaagaggaagaagacataagtgaggaggagtcggatgaggatgatgagagccgatctggcttgctgggtttcttctcgaagaatgaaacccctataccaaaagagggcgatgaagcttcagctgtggaccacgaacaagatatcgatatcaaatcggcatcggagggtgaagatgacattgacttcgaagaagatgaagtatccttggttccaattggaccaactaccagcgagggcacgtcgatagaaggcacgcccttacatatcgccaatgcttccgaagcctctcctgctattggaggagaaacaccttccgttgataccccgatggcagaggggctcactgaagccgaagctgacgatgcagccactgctggtgtcgtacatgagttggagtctgtcaaaccagagaccaaagaggcaccttctgctgaaatcgcagatgacattgatcacccccaacatatggaagtagatcatgtccatgacggccgagcaagcagggatatgtccagtgagccatcgccgggaaccttcgcaacaaagccatcagagcccgaatcggtgtcatcgctcgagccgacaatcgaaaaggcattgcaaataagtcattcgcctgctctaggcttgcagacacccatccctcagatcctgcgtggtacactacgtgaatatcagcactacggattggattggcttgcgggtctctacaacaaccacatcaatggtatcctagcagacgagatgggtctaggcaaaacgatacaaactattgcccttcttgcccaccttgccacagaccatggtatctgggggccgcatttggtagtcgttcccaccagtgtcatgctcaactgggaaatggagttcaagaaatggtgcccggggttcaagatcatgacttactacggcaaccaagaagaacgcaaacagaaacgccgaggttggacggatgacaactcctggaacgtgctgattacgtcgtatcaactcgttctgcaggatcaaatgtctctcaaacgaaaggactggcactacatgattcttgacgaagcacacaacatcaagaacttccgctcacagcggtggcaagcgcttcttacgttcaaatcccgtgctagacttcttctaacgggtacgccactccagaacaatctcacggaactttggtctcttctgttcttcttgatgccttcagatggtaccaatggtggcgtggacgggtttgccgatttaaaggatttctctgaatggttccgccgcccggttgaacaaattctggagcatggcagggagactatggacgatgaggccaagggcgtgatcactaaacttcacaccgttctgcgcccgtaccttcttcgtcgactgaaggccgatgtcgagaagcaaatgcctggcaagtacgaacatgtggtctactgtaggctatcaaagcgtcagcgattcctttacgacggcttcatgtcgatggcccagaccaaagagacgctcgcgtctggaaacttcctctccatcatccactgtttgatgcaactccgtaaagtatgcaaccaccccgatctatttgaaacccgacccgtctccacctcctttgcgatgccacggtctgtgcctatggactttaagatcaaggaatccctcgttcgacgacgactgctttttgaacacccactcaccaagattgacttggatttcctcaatctcgcacccgtatcacgagaagatatctcacgacggctagccgacgacagtatcaggctgatggctattggcccgttcaagactctccgagaacgccagtacaaccgaaccaactgggagatgggttttgatgggtccaacatgcagaccatcttagagtccttggagaatgcctgtcggaagaggcgaatggctgaattagagaggtgtctctacttcgaatccaagcggcatggtcgtcggcccgtatacggcagtagcctcattgaattcctccgggctggaaccaaggaacacgcgctatctaatgcaccactgcggaagcgctcaatggccgactggctgtcaagccggtcctctgttctcgcgtcgatgattctcactgttgaagaacgcgctcgtgagatgcatggctatgtccagagatttgcctgcgtcacccccgctgctgtggccgcgggcatgaatgaggctgccttgactccagtcgagaccaggcttttgacgaataatcgcccaaaccccccatacgatcctttccatgaagcacggatgcgcctctctattgcgttccccgataaaagattgcttcaatatgactgcggcaaattgcagcgccttgacaagctcctacgtgacctcaaagcgggcggccatcgagccttgatttttactcagatgaccaagatgcttgatatcctggaacaattcctcaatatccatggccatcggtatctccgactcgacggaactacgaaagtcgagtcccgacagatgcttacggaacgatttaatagtgatcctcgcatcctcgctttcatcctgtcgagtcgatctggtggtctcggtatcaatctcacgggcgccgacacggtcatcttctacgatctagactggaacccagccatggacaagcaatgccaggatcgctgccaccgcatcggtcaaacacgcgatgtccacatctaccgcttcgtatccgagtatactattgaatccaacatcctccgtaaagccaaccagaagcgcatgcttgacgacgtcatcatccaagaaggcgagttcaccacagactacttcaccaagcaagacgcggtcgaacccgacgcgcgcgacggccaagatgaagcaagtgccgccatggaccgagtccttggcaaccgtgtcgtcgggggaacccgcgtgttcgaagcagccgaggacaaggaggatttagacgcagccaagaatgcccagaaagaacaggagcacgccgacgatggtgactttgaggagcacagcgcctcgcacgggacaccggctcaggctggaacgcctttagccgtggaagatggggctggcgtgccggttccggagcacgtgtctgatgaccagctggctgcagaattgcagcctggccacatcgacgactatctcttgcgcttcatggagtggaacatgaaggatgaacccctggttctgccggcggataaaagcaagaaaaagtccaagaagggcaaggagcaccatctcaagaggcgtcgttagagttattgcgagatcaatgctcatttgcctcctttttggctccactccgcatgtttcacgtttcaatatttccctcacgttaacctgtttgtctctccggctatcagcttgttgtaatagtctctgtgtgtataatccaggcgttggcgatgttataatgttttatcattgtctttttttctcctgatcagctggctttattcataacttttaactctccttttcttttgctctactatttttttttctcccattctctgtgttaatcctactatattaacaaaagactcaatagaatcagttggcagaaataatcgtcacaaattactttcaaatcaatagtctatttcccggagattagacaagtggagcagaaatccttcctgggtctgcataggcagatcattttgttctgaccatataaaccttggatatttcggaggcgattagggtttagctcggtgtttatattaatatcaatagtgtgagagccggggaattgtctattgtattatagattgtggtggagtagagaaacgggatgcaacaatagtgcatatggttctcctatgttgtacctcggagatgttagagtgtagatcgaagatgtagatgtgaatatagattgtagtacaatgataatatactccatatatgcatccacagatctatcaagttgaagagaacaaggtcatctatggaacagaaatagggtttcccctattctcccgtctgatatcttcctccaacgagggtgcatggcccggtcgatccccctcaaagccaagtcacacctatctcggcaggttttctccgaacaaggataatattgaacaagggcgaccgcgtggttgaaggcagccatggaaagcaggaagtggagcctcattcggcagttaagggatacatctcggatacgattactttttgcacatctcgacggaagtgaaacagtgacacaaggttgacaatgttgccgagtattccccggttgtggacgttgatttgacgtgatttcacgtgttggagtccttggacttgttggagtcgggctccactgatcttctctccaaaagtctcccgaactcggaatggaattggcaactgtagggctttcgagctccgtactctattaagctttggagagtgcctcgttggaggtgcagcagatccatggtgatccggggatctgtgatttagtacatcctaaacctgatatatccctgtcatccggattaggtgattggtactttgaaatgccgtggatcgagatatatggcatttcgtgattggacggggaagaggaatggaaaaaaataaaacaaagagaatcagatgaaaatatgccgggcttttacagggcccataacccagcgaggtatttcaagcagtattttctttgtacaacatagggaggaggcggctgtagacacgtcaaagaagtgatcgccatttttagcttgcggatgagcaaatgccgatgtatccctgtgttggatctggtcttattgcccagtttgggaaggtagtatggaatatatcataaaacaaagaaatgatttctcgtatccaggagacttctagtcggcatttctccatggattctcattcccgagggataagaagctcccatgggttaaggatcctgaaccaacagccgaagccggacatctgcagttcgagagagatggacgtgacatatgcaggtcgaagaaacgcaagtgatgattggcacagactcgtgggacttttcatgcagctcgggcccgtgcattttctgatcctcgtcacgtcaaaatgtctctcatattctctcaatctcacgactagatgtaatagtgccatgggagatcccgtctaaggggggagaaactcaggatggcaccaacatggagcccaatattccactatgtattgaggacccgggaagatcgtcgccgatcaatttgccagatcgataggcgcttccacgaactggtactccacgggcgtcaaatcattggtgtgaggcaagaggggctttacactagttctgacaccatgtgccttagcggattcacctccggccgtaaaaaaagaaagcgctgctgccttgggatctgggggaggagatacgttcgaatagtgttggatctgaatgatgtgatgatcccgccctcctcgaattgaatttgcagcacataggttctaattgacaagggattcgaagttctcaacggtgctgcctctggataagacatctggtgtagaaatgtaatcgtcagtctatccatggaggatcccgaggtggcggtgatcggcgaccatgaggtccaagacgccatccgcgggtgagaggagggcttatctgggttggagtatatgaccgtattaggataaaactggggccggctagggccccaatgcacagtaaatcactcctggggaactataggccgtgttgtctttgcataaccgttgcgttgggatttcccccctcgattatcgtcgggcatgatcgggccaagggaactaggatagcatatgtatctgtgtatcttctcgatagatcgaatgttggaataaagaaaaaaccacaccatagtcagctctgtacggagtacaccgtagagactgaggtgattcatcgaattccgatatccgctttgttcaaacgcgccaagcactcaactggggatagtcagacataacagatgagctgttccgcttggatgatatgatccactcgaagtaatgacatcgccctgatcgtcgagacccgtaaccaatgatgtttgcgctgcgaatctcgttgatgatcgccgcgtgctggacgccacggacgctaagacccaatggatttcccccaagagattgtgtgttttagggttccataatgacagaaccaagacaatggagatgtggaggtgagaggtggtgagagggaagcgggtgaagttgggagatgaccttatattttaatgttttattttatttccccctaagctattcccccatttctacatataatacttgtctcgcccgtttcctgtctcttttctgttgatcatctcgatcttcgtactattccccccttttccacttcccaattggactgtgcgtcaataatgaagacctctatctcgtccgaggtatgggagaagaagaaggcgttgatctccaagttgtatatggaagatgaatggcccttgaagcaggtcatcaaacagatccgcaccgacgacttcaatcccaggtgagtgcaccatgtccgataccggactctatcatgaactagttaactaacatctctagtgaaacccaactacgaagcagactgaagaaatggcgagtgaccaagccatcccgccagactcgaaagaagagtctggcttcggcagaagacttagactcagacaaggatgccaagcgcaaggcatccaccatccaaagaccactgccatcattatcaacgagagaaacacaagcccgccatgaatggcccatgatacaacccatctacgcacaacatcccaccctccaacaccccgtcccagaccgggaccggaaatggagctctcctatgatccaacaactcaccccaagcccctccggcgagcacatccaagaccgcacgacagccgtctcctatgccgagcatagtccaacaacaacacccttcgaccaaacccacacctccccagtcggggagggccttatgctgagcacaacccccgccgtggccccatcctacccagcctacccactctcacccgaatcgggccttccaagcccaggcacggccacgactcccagcagcattggctggtcgccccgtgctgtcccagttgactacggcctcaacccacctcagtggtactctctgccctttgaaaccatccctcccccggccgtctctcagtctccggctgctcccatggctccttccatcaatggatacctccctcatgtccagctctaccatcctcagtattaccacggcgaggcagagtacccccatgtctatgattccaagaactggaagcgcactatgtcgttgcaatatgatatggctggccatctggctgcccgggccgagcacggagataggaagcagatgctcccacagatgcagtctcatggccagtggcatcctatgtcaccgccgcctactcagtccggtgggcctcattccttgatgtgtgctccggtcatgccttatatgggccatgaccattatgtgcagaagcctccaggcattggatactaggtgctagcttgcactggcacccttctttctgttaaatatatatgatgttttgatacttttttttgtgtgaactatggtggtggttgtttgttttgtcatacccgatatgtttggttttggggagttgaaaaggaaactgtatatcttgatacctattgattaattgagcttgatgcatcttactgtgtatattctatactatacatatctatcaaatctacaaataaagcagatgttctatagatgccaagacctgtgagttacccgggaggaacctcggcatcttgcggggaagcccccccatatcccagccatagctctttttatttgtgacctcccctttcatctctttgctcaagaagtttagaaactgccaactaaatcccaatctacattctcactactgccaaaatgcgtgccgtccaagtcagcgaatatgtcaaagtacctataaccaacctcaacctcaactccaacccaaactaacaacatactacagggccccctagacctaaaagtaacgacagtcccaaccccgaccccaacacccgacaaatacctaatcgaaatccactcggccggcacaaacttcttcgacatcctccagatccaaggcaaataccaaaaccagccgccgctcccctggatcggcggcgccgcggtggccgnnnnnnnnnnnnnnnnnnnnnnnnnnnnnnnnnnnnnnnnnnnnnnnnnnnnnnnnnnnnnnnnnnnnnnnnnnnnnnnnnnnnnnnnnnnnnnnnnnnnnnnnnnnnnnnnnnnnnnnnnnnnnnnnnnnnnnnnnnnnnnnnnnnnnnnnnnnnnnnnnnnnnnnnnnnnnnnnnnnnnnnnnnnnnnnnnnnnnnnnnnnnnnnnnnnnnnnnnnnnnnnnccgggaccggcggcgccgaattcgctggaacagtcctcgccgttcccacctccccaaacaaccgctttagaatcggcgaccgcgtcttcggcgccacacaaggagcctacgcaacacacgtcctggccgcagagcaaacactcctccccgtgccggaggggtggagcttcgaagatgcagcggggctgttcgtcacggcgccaacctcgtatggcggtcttgttcagcgcgctggcgtgaaggccggggactgggtccttgttcatgctgctgcgggcggggttggacttgctgctgtgcagattgccaaggctatgggggcgactgtgattgctactgcggggacggagaggaagagggagattgctaaggtttttggggcggattatgtggttgattacactaataaggcgtggccggaggttgtgaaggggatttgcaaggagaagaggaagggaaatggggctgctggagtggatattgtttatgatcctgttgggatgattgaggcgagtttgaagtgtgtggcgtggaatgcgcggttgttggtcattgggtttgcggcgggcaagattgaaaaggtcgcgcttaatcgggtgctgttgaagaatgtgagtattgttggcttgcattgggggcagtatgccaagtttgagacggagactgttggtgaagtttggcggggaatctttgaccttgttaagcaggggaagttcaagggaacggcgttcaaggatgagagctttgttggattggagagtgtgcccagagctttgcaggcattgggtggaagggagacttggggcaaggttgttgtgaatattgttggtgatgcgaagagcaagctgtagtctggagcatccaggactacagtagatagatgtgggaaagcaatatattgattcaatatagatataaactgatgaatgtagatgcgcaaggagtcatgctctcgtagacaaagtaaaatccccaaagggaaagactcgagcaagtataacatgaactatgaaggccctttgcttgctctggcaactttcgtatttcagaagtgagcatgaacacccgaaggtacccagctcgcaatccagctccagtcggtcacggctacaagacgtagcgctgtggtaactgttctccagaaggagagcccttgagcatgtccatatggactgggacagctggattgaggagttgcggatgacagcacgtgtctggggtttgatatatatctgtggttgggttagtgtagagttttgtattgataggcaccataaatcagaataacattaaattcagagtaatggtttgaatgtcgaaagattgtcgagagaatgtctaggggaagttgacgaaaaaaagaggagaaaagggaaaataaatggcgatgactcagcatgtctataccgcccattttctgcctcttagaggatatctgcatggaaaatactccgtactatgggcacagtcgctattgttccaattccaaatgaaatggatcgttcttcactactaaacctcaatagaccttaaattcttttttggtcagctacagaaatttccactcttgtggaaatttcaaagtgcaggaactctactattagactatagtacaagaacacttcctggagaccaatgagaagtcattatgtgcagaacccttgctaaagttttttgaccaattgacggtcttttggaaccctttaggctactgacaagtaagctatgattagaccatttcagctgtagccaagatgtatataatagccacaactttccacaccgtctttcaccttctttcatatcacaccttagctcccacgattttatgagcctgtatcattgaaaatccaactttgaacaatatcaaagtcaacgatggtttgtgtagtcaagatcctggatgatcctgtcagggactcaatcacacaagtggacacgaacacatggcttatcggtcccttcaaactctatcgatcaaagggatattccgatacatctacctggtacgaccaagaagacgatctcagttacactgtcaccaacgcacctatcggatctcattggtgtatgatgctggggatggctctgccgtctggtctgtaggaaacagcgcgttttgcaaggtcaaactatctgaaccgggtataacaccagaggcggcaatagcgttcgtcgataggctcgtctgtgagaagaagcctggtttcgaggtccctaagctcctataccaaacagaatacaaagaccggtattgtctgtttttaagcagagttcaaggtcgaactcttggagatgcttggccttccctagacgaaaaatggagacatcactacgcaaacgccgtagtggatgtgtgcaagtttctcgcgagtcaggaatgtgaggaatttcgtggtgtggacgggaagaacgcccttgagccttttctcgtcaaatccggcgcggaagaggaatactctcctgataatctccggcaatttgtatataaatgggtatggcctgctcaaaatttgtgttctaccatgccgacctcggtcctggcaacatcatagtggaggatatcccagaaactggcactatcgatgttattgattgggagcttgctagctattttccaaagggaatggattcgaaccaagtttcgactaagcagtggaatctttcttgaaaattcagctacggacaagccaactgagtggagatcaagggttagcgtgttgcttggagagaacgggttcgaagactatgcatcgcaatagttgtcccggtttaattgctagcgggactgccattctactatagacaagaataggtctgcatcaaatatcaaaccgggctttctcgcgcatgctcctgaagtcgtagctctcatagccacttgacaagtctcacggaatacatggggggtgtagatagtcagccgaaggcttgtaggtttgagttatatgtttccatagactaaagcaataagctgtctctacgtcatggatggataatattaaagcattcgaagactagcccctgaagacacgtccgcgtccctgcatcataagacaatgttaaagacggtgtccttgagaaggcgaaccgcctatacaaacttgaccaggaaattacggtcagtgtttcttaatgtgtagcagtcaatcaataagcaccccacaaagctactgagataccatctaaagaataaaactcatgggccgaggagcaaaaactctagggtatcttttggagtatcttttggagtataaagaagctacctcgacaccgacggaaccaggtaatcaaatcaccgagcgatgagacaagtcctgcttactcaactcgtagcaaataactacaggggtgcagtacaattgtcctacccaacaaagagtgaccaattgggtccttcttccaaaatccagagaacaagaacaacgttacttatatataaaacgaaaggatcagaactacgtcaaatccacatatacatacaagtcagtcaccacatgatcattttgcaggtaccaccatggcccatgaaaacatatggtttcccgatcctttccagaactgcaagatcttgagtctgaacgagcctacaccttccaactgggaagtctcccaaaagatcaacgggcatgtcgagcaatggaaagacgctacctgccgcctctcctctctggcctccgccaagttcgtctgtcgtgataccagtgaatctcccaatgggcccacagccatcctccgtatcgtgaagcagattccctctaccaaagctcaggtagccgaacaatatactccaaccgagctaaaagcatcccaagccatcttgctcaggaagccactcaatttactctacccgagctaatggcataccaatctcccaaggaaagaaattcgcccaacacccctaagctcctagcatggcagcaagggactcaggatgcctctggtaccatcccaggtggctttatcacatggattatctttgtggacattgagggaatcgcccttggcgatgcgaatggggctggcatatattgggagcagccgccggaaacacgtgcaaaaatccgcgaggtcttcatgaaggaatacacgtaagtcagccctataaaagtttccgtctaggaaaaaatttggttattcctgtttttggatccctcgacttggcccctatgcttgcgcatgcttgcgcatgcctcgttgaactcctgattcaaagctgtttattgaggaatgatactaatacataatgattagtgaagcctctgaaattggaatcctaccagtccatgatggcctggaaatttgatatggaacgaggagaggggaacgatgtaagtcttccattacacaatgcgaggatatgatgcggaccaggttgttaacatgttgtattcagtcatttcgtgggatttgaagacccagaattcttccagcgcaagggtcgggtgacagccaaaatattccctcgctataatctatctaagactccccctggtgaccggtggtgggaatatgaggtgaacaaagatccagatacctcgaaatggaccttctagtcaaactctttgtttggacatcggttgtcttcatattagcctcttcgttttcgttcttcggtgctgatgctcagagacttgaggtatcatgtgatatgagactattagggaaggcgcatttgagggcaagtgcctgttctaggaagggagtgggggtataaaagaacttctcccacctttcctcctcttctcttcttcccctccccatctctctgaccaccatctctccgtagccccatgagacagcgtaggcagagggtgccgtagcacatgctgcttaacctaccacagggatcataacattaccatgtttgttatgaggtctatgtaggtctgcatcaaataacaaaccgagctttctcgtggaagttcctgaagtcgtggctctcattgccatttgacaagtcccacggaatacatgtagatagccataaccgagtactcttaggtattcaatagtcatctaggcagtaaatccattacactcaaagacaatcagctttacggtagtcatattttaattcacacacatttgattcaattaatctatgggaaactctctgcaagatagcctaaagatcgtaaccatcaagggcataggtgtaaatgcagaggaagaaatcccaaacacaaaacatggaactgagaggagagaaagtagcataacatcatggtactcgttcatatcataggtagatgtcaaatgagttggcgttagtatcatcaatcccgtaaagcccatcacacttaatggtgccgctcacacatctcaacgacagtagtccaaccctcacaacaagaccggctcatattatgtccacaccagcagcaggtcaccttgcggggtagaagaggcgcaggccgtagatcgggcatgccttgggcagcatgtgcagctggtaattgaccgaatggcagagatcgtgagcctgtcaacttgcgggtaccggtgtcgggctgtgttttggagcgcgttcggtccactttggaatctgagaccagacgctcggggcaggcgagacgcgcgtagacttcggagggtaggtcgtgccagtacttgcagcggcagcagattacgaagatcttggtgagggtttgtgggctgtgggctgttttcgctttttgggatcttctcttgaggatgctcatgggagctggtcgggcttgggggctgccgctttgggtacccggggggctgctgggctgcatgccgggatgagtgccatattgagggccgtactgtatgccgcgataagtatcagggtgagacgcgggctgctggatgggctgcaagacaggttggttgccaggttggatacctggcgatgtgttgggttgaatgagtggactaacgggagcctcatgcacgactggcgcttcgacagcggaaattgcaggactagtatccacgcgattcgctgaatcgcgtttgaattcagagggttcaggtgcatcttcgtcggcagtgtcataatttgaatgaccgtcatgggaggagttatgtgaaggacagcggctatgtcctggcatgagccctctaggttctccagcaagaatattatcctctgggggtccggtggaagcgtgagaataccgacggggagatttcgcaggaacggtgttactatccgacagatccttggatgttcggctgtttctctcaccgggcgaaacacttcctgcatgtactggagttctgacgggtacctggcagggagacgccgggatgtctttgaccgtatcggttgacgcagttggcattccccgaatctcgagactccgtctttcactcttgactggaatcggtggcatttcgaccgactgcgaagtttcgtggaagttttctttgaaacggcttgaggttcgtttgggggtattcgacaaagcggtaggcaatcgacttcttcctcgatcctcgggatgagattgcccaggagagtgtaatggttgggatgggttctcatggttaggtttgtgtaatgtcagggatcttggaatcttgaaataactctgggccgattcatctgtatttgcaggattcaacgcgaggggagacgacttgtatgctcgcgggaagggatccactcggttcatcctggcaaggtttcccgtggagtttgtttgtgctaggctgagtggttggtaagacttggcaccagatagagttgacggattgtctggagtttctgggggtgtcatttcctgtaactgacgagccgtggtaacttgagtaggcgaatccgaatgaccgggtgaatataagttaggctggctcaagcattgcgacattggcatgctagtagccctgacagaacggtcttgacgagtcacacgatcaccgggatattctgccccgggcatactcttcctgtcatgcttcagcgctgcagaaaacagctccttatccagatcgccggaggacactagtgtctcgccgtttctagcacagtttccaaccacggaccgagtaacagtgggaatctgctccgacactgatcgattggattcatgtccatccttcgtcctccaggcttcggctgtcttccaggcttcagccatcttccagttctcacgaaggtcatcagacttcgccgtggcgtgcaaccggttgtgctgggttgggttggacattttgttcgaagcggataggttcagtgcggtgccatgcttggactgtagctctcgggtgatagccgttccaaacctttccggtagagtcaacggaagagatggtgggttcgtatctgtcctaagctggttaaactcggcagacggatcttgatcactcgaacgtgaattccggcgtgatcgccggaatatcgaggacaggctacttgacgatttcggacgctctgcattcgcactggagcttctgcttgagctgctcactggttgtttcttggtcaaacggcgagagtttctgtcatggattccgatatcgccctgggattgggattcctcgagtgctagcaaccgcttctcgagttcttttctctcggcttctaggcgctttgtgacacgcttttctttttctttcttcttgggtctttccaaggttggtttggagatattgtctccatctccgtcgggatagattggcaagggcgtcatttgttgggttggggtatcattttccacaggtgccccgtttgcgactgatagacttgagccaggtgtaccagtggagggtaaacgagagttggaggagtaagagaccgagctcggccctgtctcatcgtacaaggagtgcctcgcatgggaattactatcggtggcctcatgtgcgagagcttcgcgggcgagaaagggaactgggggaacaaatccactattctgattgtgtcgtttcttcgaggggtcaaatgagattcctaggctcctccatattgctgttgttaacttacatccatagatttgccaaagacgcggtggatgtggttagagatggatgatcgacgggccctgcggggtggatcggtggggaaggtctccattgcagttggtaaattggttcagttgactttgatctgaaaagaagcgagagacattgaactggaaaacagtccagaaatcgagggatcgtggatcgtggatcgtgaaacgtgaaacgtgaaatgtgagagatgtaaggcgtgagtcgtgaatcgcaagtcaagcagataaacaaaaacgagagacaaaggccaaggccaaagaacaaaataaaacaaaaaaacgaaagcgaaggagaaaaagaaagaaaagaaaaaaagcagcgatgatcagtcaagaagcaaaggattccaaatccgctagcattggctgcatgtgaaaccttccaccgagctattcttagtatttttttttggtcatctgatctgtagatttatagattgtgatgtatacgatttctatacaatcctatatgtaaatctataaacctgaagagaaccacccaaatctgcactcggcccagtggaattccaaactcatcgaattgtgaaactcaaagcgtccgaggcccaaagaagttggagagtcacactcgccccccacttcgcatcaacatcgaaatctcacctctacatctccccgagaacaactaaagatactctgcctaatcagccttaaactgctatcggttactcggtgctacaactacagagaatacaaaactaagaagctacacaatgtccaaccaaccccacaacgacctcccgccaagctatgatgcatcacaacaatcctgggggatctccggcactaagccacagacaggcccttcagcctcagcaaacccacctccatatcacaactggcaggaagcagtcccagacacagccacatttccaccacccccaatcaccggctacctaatctcaggcacagggaacgcctccgaagacgacgcccagcgcgcccacgatttctgcaactctgtgcccctctggctcccagctcagccctcgtcggccgtctaccacgacgtgcaggtccacgatcttcggcccgtgcagccagccgagctgcgtggccatgtctcggctgttgcgcgcggccgctggcgaggacacagtgtcgacgggaacggggattgtgtcgttcttacccagctgcccatgtatttccctgctacggactcgccgtttgtgcgcgagcagaagaagaccatctactttgaggttaagttgctggcgctgagggcggggccgacgccgcaggattgtagtggattttcgattgggtttgctgcgcagccttatccgtcgtggagatcgcctggctgggagagaggtggactgggggtgttttcggatgatgggtgtcggtttgtgaatgattcctttgggggtcgggactttacgatgccgttcaaggtgggtgagacggttgggttggggatggagtttgagctaccggagaatatctgcagtggggataagcatagtaagagctgcaaagtgcatatcttcttcacgcggaatggacgccgatctgagagttgggatctgcatgaggaggtcgatgccgattccggggatgttgagggcttggaaggggattatgacctatatggggcgattgggctgttcggtggcgtcgatttcgagtcttgtttcgaccctgcaggttggctatggaagccggaatgaacgtgtggtatctgtgaagggtccacgcgggccaggccgtagggctgaagtggttttgctttttacttttgctgtatggaatatggaatatggctttgggggttccaaatgcttagctagtatagcttgacgcaccaaatcaatatgagcatgaagaagacaaagaagtatgttgtacatataaaagccaagtaaaaaaagaaacacgctaaccaatatctataggctatgtagtttgcacagcctatttcaacggccaacgccgaggctgcatagcgtaaacgagatcccgcacgttcgttctagaaaggtatttttaattttcatttattcttaccttcggctacaacaatcctagtaaatgcagcgcattagtggccggggggatgcacgaggtgcagttccgctataacgacggtccttgcgacgtccgatgagtagtaggtgcatctctgccgcttttccgtatggtccccggtctaccccagctgcatgaacggcatgaacggcaggaaatcgttttatttgacgtcagggtgcgttgagcgcattgcgatctttgtccttttgcatgttgatgtatagtgatgtatattttggcgttgagacacgaggattagtttgagttctttgagcatatcatggttgatagctatgtatatagatatatacgtgtatatgtacgttacaaatgaaaagatatatatgggcagggcatggtgaggctgatactcgaaataaatatatatagtagacgcgacggtactccgtacttactccggacctcatacaaagaaaagagcctggagaaatgcgcactgacagcacggagataagcctgcgctcggtgctcttctaaattgtcctgttcgcgaacgatgcgtctgttcatctaattgctcgtatctgcacgtcaatgacggggttcatagcgattaatacgaaagagccgcagccaatccccgtccgagcgttacgatttgaaaagccattcaagcccagtgccataggacaatatttatcagatttattttgcgcacctatatccggatgtagcattaggctctagaaacccgttaatattattaaaatactcttgtacctgtatctgaaatacataaaaaagccagtggagcaccaacctcggtgataatcccgagactaccagccaccaagcccctattactgcaactaacccaccagggagcggctagaatggcacggatgtttccacttttggatcagaccagttataccccggctaagatcatcctatttgcacgggggggggaactacacgagctggagcggatcagcttctacagctatgccactgccggatatgtgtatattcgttgtatctttccggttgttattcggagtatgaatccggtcctctccttttttcttactgaggggtaaatatggagtagcagaatcacaatgggtttgtgtccaggtatctttgtccgatccactgaaaaagttacgaatcctccccccccccacagccgatctaaatttctgagtaatatgctaaggtacgatagaaaaagagaggaactagaactgaaagggaaaacagaacatcatccggcttgaaatggaagtggccgaaagggaaatttggtctgatcgactgcatgtcatcgccccttttccccgtgacagtcgaggatcccgtttggccccccccccacctggacatttatttgatatcccggactgacttcgggtctatgcgtcaaacccacaacacccccctctccctgtctttcacaaatcataacgttgaaaatgaaatagaaattcggccattcccggctgtcggtggagttggagcgggttcaatacattactgggagtccgtgcagccgagatacgcgtttgtttcactcaagacgtgatctgggcacggccgggagacggtggttattctgtacgtccatttcggctcggccgggagagtaaatggagaaataacggggacaaggtacgggatatgcatatgcagagaaccctagatggaactgctgcagataagaacaacgaaaagaaagacaaagaaagaaaaggaaaagaaaaacgtctgaattgccacttgtataaccgagagagaggtggtcttagccatttgccaaaagtaccagattgcgattttggacgatcagaccaaaaggatatccatattcggccgtatgcagatacattaattccatcatctccggccgtgcccccatttcgctaaggctggaacactttttagacgccaaagcgacaactggcgcgaagccagcggttgtctctatctgtgaaaggaaggagtcccgggatgtacggagtacccattatgatcccggttagggttggatatatgttgatacgttagtatacggagtactcggagtatacttagggatatcagggatattactgaattgcatagatattagattcctatgctaataagcctataccaatatgagcacggtccagctgatttcgctttcactttcactttcattcacattcctgtctacccatgaccacgagatttaccttcacgccaccgaggcagctggttgcccggcattaaacgcgcaatcaggcaatcgaccttcgctttcgtgttcccatgttttcccatgttcccccccccgtttctccgcctatctttacaagctcttagtaatgcctgtatataaaatccctccacacaccgggtattgccccaccgcgagggaggaacagcctgttacacgggcactttaggcgatcgccaccaggattacccgtaattttgttttttgttttttttttagaagtaggactaagttacttgctataataagcatttggcttcaagttacatccaggcatcctgttccgaccaatatgcatcttacgtttaatctattaatcttgaaaagaaaagaaatgaggaaaaaataggaaagtattccacggtactagtacttttgaatttcgactccgttctgctgcgggccacgctaattagcaggcatgtattgtcagaaagcggtaattgttccacaaatcacctttccagcaaagctataggaaattatttgtccaacgtaattatgggaatatataaatataaaaatagagatatctaggtctgtgtccagctatgagttccggtcgactgggcaccaatgaagggtctttcgagttccgaggcgaagagcatcgtgcatggccggatatgttctccattggaattgctctttgtgttgcctttttgccggtaaaaagaaaaaaaaaatagattgtttgtatggtacttagcaagaaagtcgttttcttagggttgcattgcttgaaagaacaacactacgccgtaccaggtatctcatatgcatccaacccaaaccgttgcctattatccacgatcttatttggatctgatttttaactaatcaagttagcatcaaaagtaaaacagaaaaggtaaaaaagtaaaaaaacaagaaaggtacatgcatatgttccccacaggggtgagcatgctcatgctcagcatactccaaggcgaactttcatttggattttgaatcttgatatattcggccacatgagatcaaagcgaagtatgtatatacactatacatatacataggcatgtgcaatacgtaaaataatcctctgcataggcctccaatgcctccacccatggacggcctctagatccagggtctctgacgcacgaggcaaaaactacctgcagcacactcaaaacgacaaccaagactggggcatagctttttagctcagctattttttttagtgtatgttgtatttacttttcttggattttataattcttttttataattcgggagattaatattatttctatattatcttctgcattttgtttagttcatcgcatgtgctgcctttcttcctactttaatctctctctcccttcaatcgtactcatctcttttttcccttttccctcttctcttttcctttgacattgaaggaagcattgtctccttgacattcgttaagacttgctttcactaagcctgccgaggcaattgaccaccggactgggtcaataggtatagcgcattgaatgcttatacctccgcatcttcaaaacgaagagaatcccccctgaaaatagtcagagatacgtggggatcaagtttcacatcatggcattcccgtttctgcgagcattcgtcacactcttgtaagtatagattgggagctcaatcagaccactagctaacgagcaaccagtctttatcgctacacccgactcgtgttcaacctgttttccttttggacattcaagccaatcccaccaccggagaatcccaaattgacatcccaagatgtaacggtgatcattccgtcgttggagggttgtggcgatgagctggtggagaccatccggacaattctcgacaatcagccgttcgaattgctcctggtgacaatcgaggccaatcgcatcaaggcccagcagatgctgaatgctatgccagcgtcaaaatcccgaattcgtttgtttacagtggagcaccccaataagcgccgtcaaatgacggaagctattcccgaggtccgaactgccattacccttctcgcagatgacgatgtgagctggccacggactctcctcccctggattctggcgccctttgaaaaggacgagaaatacggtggggtggtgacctgccagcgattgcgccgggccacggcgccgagcctctcacagcgactctggggcttcttgggcgctttgtacctggaacgacgcaacttcgactgcggcgcgacgactaatgtggacggtggccttccctgcatgtcgggacgaacggttgcgtatcggacgcgaattctgcagaatgaggccttcacctatgcgttcaccaatgaggagtggtggtgggggaagtaccaactcaatgccgacgatgataactttatcactcgctggatggtctcgcacggatgggaaacttatatgcagtaccacccagaggcggaggtgctgacaactctcgaggacaaccctcgtttcttgaagcaatgcgcccgctggtccagaagtaattggcggagcaatttgacttcgatgtttcacgagaagcacatttggcagtgagtgcaacttttcctttctttcctcttgaattgtcttaccttgactctcttttttttcccccctccctttgtttgtttttctctttgatcgggtcaaaaagagtctttttggtccgagtcttggtgtgacattggaaacaaagaaaccacctgggcagaatatgcagaacagagctaacatttctatagtcgtcagccctggagcgcctatgccgttcatttgaccacgttatcgccacctgcctttttgggcgacattctacttgtctggttgtgccacaaggccactggatcgtggggagagtccttgcacgatcaatccatgactatgctctacctctggatcttcactagcaagtggattaagctgctgggccattaccttcgctatccagttgatgtgctgttgctaccagtatccatcattttcggttatttccacggcgcaatcaagatgtacgccgtaatgacattgaatgtggtatgtttaattctttcatcttttgattcttttcatatttggcatttccatttccttttccctttttccttatctggtgcatatacggcaagtgtatccaagcgtagcccctctcctatgacaactcagcatcacagcgctttgatcgtctccttgcagctctgtttacccactattctcctatttccccgaattatttgaaattgcacagctctttgccgttctgatttgatctgcctttttaaaattgactatccgagagctggtctaactttgccttttttttcacagacaacatggggtagccgtgatggcgccgatgattatgatgccgagcgtatgaagaagcggacggatgccgatcgaatgaagcaaccgtactatccgcaatatctcattaaatgagttcttcgattttctatttttttttaccgaagatccatttcctgttcgctttcggggattggtctaccatgtccgattgtacaacaggggagaacttctagcccattgacttggccctttatatcatgacgaaacgccgtgacgacacctatgctttgttttgttctagatctgccctggttttttcttttttttgtcaaccctggccattccgcctgcccaagtcctcgagagtacgagcttcgaagtggtcatgctcttctccctccaacgaaccaatgggtatagcgtctttacttcttctgcccaatgtttttcctttcttcgcacatggttgcctggttatcaaaaacaaaatggtggtctcgatcgaggccttttccccttctcttcttgtaaattacaaaagcatgggcggatctcgttttgggaatgttctgtgacttctttgcgtttcagtttgcttttcagctttgattcccctgagtttttctgtgagagcttttgtctactctttttagatgcaaggtggtattctggaactttggttgtttctctcctgttttgctttctcaaactgcagataatttctaattgattggaatatactccgtacgcatatttgtccagggataggaagatatagccctaaagctacgaaggttgtacttcggcgaaataatggatgcatcctgtcatagttcctacttctggtgccatgcagatgattcggtctagaaccaaccgaaagagggttgaatgtaagaaaatagtgtcaaaataagctgatcattgacataggtacggagtatataatattcatgtaagacaaggtatcccgttcggattaagatgtggcgtggcgagccaagacttttcggaaatgttcgagttccaaacaactccaacttcgaatccaggaaccaattgtccctccaacccgcgctttcccaaatataatccattttcaagggcctggtactttgttcaagatggtggctttcgctcgcgctgcgctgtcttcgcagctatccgccgtcgcccgtccagtctcgttatgccgacgcatccactcgtctcacttcagatcagctgttgcacacccaatcactgctcacggccctcctcctaaagccccagagctcaaggaaaagtcaaaaccgaaggaggcggagctcccagcccccgagggtgaaggatcgcgatacaacctcaccgctgcgttgaggaagcggttttggaaagatgtccatgtgcatggaaagtcaggtatgaacgataaaggcattggctgtctttctcattgattgaccccgtccttcggtgaatactcatcagctaacccatatctagacgaatatcaagtcctgctggacaagcgacccgtccgaaccccgacgaaagaagtcctgactattccctccacaaagccccacctcgcccacgctattgcactggagtgggatgtgatggcctccgcccaggaggctcttaaaagccacctcatccctatgacctccctcgcagcccgcgccaccgatatcgcccgtgaagatgccgagggcaaaaacaccaccagaaaacagattctcacaaccgccatgcgttacctagatacggataccctactctgctgggagcccgagcgagaaatgcacgtgctggagcggacggcggccgatggaacgcccatcgagagtcttcgccagattcaaacgagaattgccggcaacgtcatgagctttttgtccactaaggtctggcctggccttgaaatcatccctatcctcgacgccaatagcattcttcctctcgcccagccgaagggtacgaaagacagtatcggcacttgggtttcgggactgtctgcgtatgatctggccggtctggagcgcgcaatcattgcttccaagagtcttctcattgcggtgcgcctggtggtggaatggagtgagaacttccgccatcttcagcgacctgagacgaagaggttcggtatcgaggaggcggctgaggcgtcgagtctggaggtgacctggcagactaaccaatggggcgaggtagaggatacccacgatgttggcaaggaagacttgaagcgacagttgggtagtgttgtgatcttggttagtggagagactcggtaagctacgagtgtatattaggtatactgtatgatagatatagatggcatgaccatgctttgtataaatgcgtgtattacaatgaagactaccatgagtttcaccatattctgtacaaaaattggtaacatactgggacaatgtagagatcgggtagggcttagtatggtaggtacgacaggtttgggtttttcgccagaaggttaaccagctgccatgaatcatctatacatatatgtatgtagcctcttaaataagcctcgtgatttccaagctctccgcgtgattgttctgtgacaaaccagcatggcctaggagtatcctccgacatggtgaggagactaaagaaagaacgaccaagaagggccaagttgttgatcaaaaggtaagtctatccatacctagtaggtgtaagtaatatgtcataaatgtaaagtctagctctgttataaaagccactttgttatcgtttttctggatgtctttttcggtgtcttttagaatataaccgctaaccatccccaattattgttagcaggggacctttgatacgagctttttctagacatttaagaggctacatacatatatgtataatgtgcaaccgatacggtattccgatatgtaggcaacgtgaagtatgttaacgacgtttgatttatatttcccctactagttactaaaagattgtataggttattttccctcatgaccatactaagaccagccaacgactatttatcaaacgaggcgatctccttgagtcgagggtggatcatcctaatgggctacttgagtttgatattgatcgtctacgagaatatgcaacttgtgccctctgtcgtatggaccttactcccgcgacttaaaggttctcatgcttagctggcttgtggcttctatcgagggcccgagggcgttcgacgatattcaatgacttgatgtttgcattccaacataatagtagaaatcgtaattagctcacttaaccctatgcattcttggctttgaaggcaagaagccctctttctatcccctgttctggcgtagcaattgattcaatgcacggttcctactatcgctatcatgtagagctttgccatctacaatgcgaattgggattgcagcctagacgattctatacggagaaaagctggttgttcattgacatatgagaatggtgtaaatgctgcagctgtactacttgtatctcccgttggacatcggatggttattgctaattgagcaagccaatcacttattctgtcatcatgaagctattcagagatcacttaactctgactttcctcttaccctatcctttgcatcactggtcaacagaaaatgtcatccaccgctaaggctcagtatatgtggatagacatgaaatactgaagccatcccaccgtgttggaccaaatctagcctactccctgcttttgcgactatgccctcttaaatgcgagagatcatactaaaagcataaaaccacgcagagggtaccctcaaacaactttcacccgaattcatcttttcgcccgagactctcaattattgcccgatatcgctaaacagattttagtaactaactgactagttattaaactaatgttggatgcctaatgaataaggcacccagtggggaacgaatatctttgtccacttcgtgctccgtacagagtagatagatctcccattctctctcttcctaccctgagaaatctgaacatggtccctaaaagccctcgtacacgctattctccttattcatatcgtactcagactctagagttaatcactcttctttatgagatctgcctaataccgtcgagcatggtagtaccattattaaaagcatagtgtagatcaggtgatctccaaattcatggtacggtcgtaaggcagatatcttagaccggaagaaatgctgctgacgcttaggcttgtctgtcagttcttctgctctaccttacttttcatagtggtgtactataatatatggcactcgtactgaaattaatatgcatggagacttcgcctaattaggttagaccgccgtactccgtagtaaaatcgagactcgaggggacccctacactcatgccaaggcggagttcagcaccatttgccccccaaaaaagggcccgaggccccctcgaatttcattccaagtcctcaactttgagcagacaacattcaatttaatgtgttggacatagtccagtgtgctccaagtatgtctgatatacctgaagagtaagtctttgttcccctcaggttggcactagaaaccctcgacccatggttcgcatcatgacagcggggataccttggcttcactgccttgatatatctgtcctgagcctgcaccctttgaagcagtaacatacggtgcccacagtgcaaagtgtacggattttacacacaatttgtactgacatgccactgtctcgcaggcacaaacacaaacgctctcgaagcgcaatagcactttccctcctccaccgcgacaagtccaaaggcgaagataaagatcccgataacaacgtagacaccaactcgcccacctccgcctcaccaagcccgggcccattgaaacacacccacagcagcagcagtcgccatagccgtcgcaaaccaggccaggacacaagttcgccacccgccattcaagaatccgccgaggatatggacacagtcgaagacctgccttccttgaatcaaatagagactggcagcatgtcgctcgaacagtccgttcgcacctttcgtctcttcgagatcttgcgcagcggcgataccaccgctatctccaaggccatcaaggataccatcgacccgcagggtgtgagttatctcaacggcacgaccgtcctccatttggctttgcaatgcgccgagccccaggtcgtggaatatgtgctgtccaatgcggaggatatcgatatcaactcgcgagatcgggatggaaacaccccacttcacattgctgcccagctgggccggggcccgcttgttcgcgatttgctgaatcgtccatcgatcaatgattccattgtcaactatcgcggtcagacgcctctcgatctggcccgtaccccggaaattttccagcagcttcagcttgcgcggtctctcttcatcgatagcaagaaccaggaaattcaggctttgattaaaaacgctgattataagggcttggaggctttgctggaggaacctcgagtggagggtattatggatgtgaacagctacgacctagttaccgacccgacgacagcccaatccggcggcacgcttctgcatgagggtgctagaagtaaagatgcgcagctcattgaaatccttctgacgcatggcgccgatcctttccgccgtgacaggaaggggaagctaccgcaggatgttaccaaagatgataaaatccgtgctctcttgaagagatcacccgctgctgctattgcccagcgcggtattcaggaaagggctattcttggaaatagtaatgcccaaggccttgccgggcgcgtttcgattggtgatgccccgcttgccggcaaggatgctcgcgaaatgagaggctatctcaagaaatggaccaattacacaacgggttataagttgcgctggttcgttctagaggatggagttttgagttattataaacatcagggtaagctcacggctcatcttcagtttcgcatcacccctcgtgccgtcgacccctgctaaatttctctatagacgatgccggctctgcctgtcgcggtgccattaacatgaagattgctagacttagcatggatgcgcaggataagacgcgttttgaaatccacggcaagtcgtcggtcaaataccacctcaaggccaaccatgttgtggaggcaaaacgctggttctggtctctcaacaatgccattcagtgggccaaggacgaagcgaaggaggaggagcgtcagcggtccaagaacgcagaagtgcttcgccaggctaagatcgatcacacagaaggacgtcctacagataccccatcagagtctggtctttctcacaagcctagcacaaagaatctcgctcctccgtctttgggcggtggtagcagcagtggcacaaggctcagtacatatgcatctcgcaccaccctagatactccagttggagacgaggacagctccatttatggcggttcttatgaccacgtccctgctccaaatgacatgaacagagtagtcagtcatgccgcatctacgccggagggggagggcgatgatgaagaatatatcgactatggttcaagtcacgataacgacatctcagccgctgataaagatgccctcaatatcaccgcacaatctgcgaagcttcagttggatcttcttgcaaatgtggcagcctcgctacaagccgagaaatccaagaatccgcaaatgaccatcgcggatccagccctcgaagaggcactcggtgcctacgaagccgcagtcagcagcctcaagggtctagtgcagaacctgctgaagatatcacgggaccgagactcttattggcagtctcgtcttagtagagaggagtccattcgtcaaatgtgggaagaaagcatggcccgcgtggcccgcgagcacgaggagctgcaatctaagatgggcgagtccgaggagaagcggaagcggactaagcgggctctgaaggaagccctggagagcgcaacaggcagtagccgttctatcgtcggtgggacatcccgtttgccaacagagagacagagtcttgaggccaaccaaattgaagctggggctaccgagacagataaagcagagcagcccacacaggaaccatccgaagtacccgaactgtctcgcaaaccatcaaactactccgagctcagcagtctctgcgattcagaatcggacggagaagaattctttgatgctattgatgccggtgaaatcgaggtagaggatgtcagcaataccaagaatatcaatatggaaccaccgaaagacgaaagtgctgagcttcgggctgtgaagagtaccctcatcgcaccatcctttaagggttacgaggatcccatcagagagcgacttaagatggatgctgatgatcggccaaagatttctttatgggtaagctgtgaagttagcttctgtttttttctttgccagtgctaaccacaattttagagtatcctgaaatctatgattggaaaggacatgacgaagatgacgctcccggtgtccttcaacgaaccaacttcactacttcagcgagtggctgaggatcttgaatataccgacctccttgacatcgctgctggtcgggccgattcaatggaacgcctggtctacgtcgcctcctacgccgcaagtgagtatgcttcgaccatcggccgtgtcgcaaagcccttcaacccccttctgggtgaaaccttcgagtacgtgcgtccggacaagggctatcggttctttgtggagcaagttagccaccacccaccgattggagctgcgtgggccgaatcgcccaaatgggactactgggtaagtgcatccgattttgtaggcgtatatctgttaccagggctaacccaaactacgtatatagggtgaatcctccctcaagtccaagttctatggcaaatccttcgacatcaacctgctgggcacatggttcctgaagctgcgaccttcctctggtggagaagaactttacacctggaagaaggtgacctcgtcggtcattggcatcattactggtaaccccacggtggacaactacggtttgatggaaatcaagaattggaccaccggcgaagtctgctacctcgacttcaagccccgtggctggaaggcctcatcggcctaccaggtgacaggaaaggtcgtcgacagcgaaggctctcccaggtggagcatcggtggccgctggaacgataagatctacgcccgccatacccccggcttcgaggcacctgtctccggccaggatcccgagtccgccaagacattcttggtctggcaagctcatgaacgtcctactggtctacctttcaacctgactccattcgtcatcacactcaatgctctcccggacgccttgaaggagtggctacctcctaccgataccagaaggcgaccggatcagcgtgctatggaagatggtgaatatgatttggctgctgatgagaagcaccgcgttgaagagaagcagcgtgccaggcgcagagaacgcgataccaacggcgaggtctacgagccgcaatggttcatccgtgacaagtgtcctgttacgggagaggagttctgggctcacaatggaaaatactgggagtccagagatgcgcatgattggagtcgatccgaggatattttctgagaggtacttgttaatttggcttggctgctttgtacagactctcaattgtcataaataaacgaatgaattctgaataactttctcgtgaatatggactcaaatgagtaaaatcgggtagtaaataatatatgtttcggtagagtccatctaatgaatacaataagcctgacgatacaagtttcatagatggtcgttatcagtcacgtgtcgccgcaaaaacatccccagagctatccgtggtctgatcggttcccctccacaaccaattgacatcgcaatggcaggatacacttgtgtccagtgcctacagaccctccgtaacggagtccgggcctcagctcctcaggctcgcttgcagagcctcgccaccgcgcggagaagaagccccatctccccgtcgttcatccgcagctttggctcgcaacgcaacagtcgatcgctgggcaactcccaggagcagccccagcatacccacagccagtcctgctgtgcttccaagtcctcgccttcgcccgtcgcgcagcgggcagctcacacggcaacctccgccgtcaaaactcggctcaaccctcgggccgtcttgaaacctgacaacctgttccactccttctcgaactcgccctcgccggcaattcgcaaacgcgctcagttcatcaaacagaatgccttctgcccccacccaagccaccagcagacccgcgcgcccgtctcgccgcacgaccccgaagccagaaaaaccaccgatgttgcaaacctgcccccggctcattcgcacttcgagtgccccgactgcggtataccagtctactgctccgaggaacactggatggatgacttcgaggctcacctcgagatttgcgacactctgcgccagatcaacgaggatgaccatgacctgaactccggccgctccttcccggaattcaattaccccggtcctcaggatgataacttcgttatcaacatgactaactgggatactttcctctatacccgtgaattcccggctatcaacgacgaccgctccatgcgtcaggttacccgcatgctcacctacccccagacaatcggcagtgtcctgcacgagcttagcccgtacagtgttcgttccggtggacgactcacaccggagggattgaagagtttgagtggtaagtcctgacttctatacggcagtagaggactactagcagcatctcccacacagcaaactaacccatcctcagccctgcgctactccctccaccccccgaaagctggcgaaggcattgacgtcaagggtctccgcctgaaggcgcctccagtgcgaatcttcatccttggcgcccgcgcagagtcctccctcccccgcgacgtctggctgcagttgcagtacatgtacccgcgcgccctgctgcacctgatcttcatcggaccggagagcatgacgaatcgagacggggagtatccgcttcccgagcgcacgcccgaaaaccccttcggcggtatcgtcgaggacagactcggtggccagatgaagattactacttacgtggactacttccacactatgaacaaggcgcagtatttcggccccttcgatccttacctggattgtttcatgctcttccaccctggtctgggtcacccggctagctcgcatgagtgggaggagacactgccccagttgcttgagactaaggttcccatcatctgtacagggtatacgcagtgggatctggagcgtgatatcaactgggtgagtgagaagtgtcgtggggagtttgatgtgcttctcgaacccggggagaatatcttccgcagtctgcgctgggatctgaatgatcaggatcctcatgatgtttcttgtggaaactggggattgtgggccttccgaggcaagaggtatgtggtgtcttttactgaatagagggatgttgactaacttgctctgcgacagatacgaagctgctttcaccaaggaggagtaagctagttgtgcctctttccttgctgtacgatattttttggtgcccgttcttggggtcattttagtagataaggttcagtttcagtcctctccgaagttattcacgattatcgatgcgcttgatttcagtcagttcgttcttgtcaagcatacgtagatgaagccgtagctaaggtcttagtgagaagctaggaatatgtaaagactaaacgctccgggcatagttaattgaagaaatattacgattaggcacaggtcaggggtagccgcaatgaattgtatcaattgcacaaaaagtagagctcgtcttacactcgttaagtaacagtagtatgacatccgaaggaaaagatgcaagcatcaatgcagggacagaattcaaggtcaaccaagacagaaaggaagtagcatcaagatagaaaaaaaatgcttggatgagatcaaaaggggagtatagaaggtaaaagaaaagggtataaacatcggaaaatcggaaaacacgtgtcaaaaccaccgtaaccagaaagcccgtaaccagaaagcaaggttttaaagacggtatgtcaagaagaaggaatatgtagaagaggaaaatatcccaaaatgaagacttgggaaggatcaagtggggaccattatagatgggcccgatgtgacgaaggtcgacaccaagattgaggggttaactcgaacatttttcctcaaacgagtcaaggaattgagtttagatcaagagaagaccagcaatggcgcctgcaccagcagcaatgaaaccagggaggtggatggaggcagcaccagcagtaagaggtgaaggagtagccgaggcactctcactggcgggggagctgctagtagccttgatcaggggggtggagctggcaatgtggctcatggaagggatgacgctgagggtgggaatgctagtgatgacaggcgtccaggtcgacgagggagcttcagtcgaggtctcaatgggggtttcagtcggggtttcaatcgaaaccgagctcgaagttgaggtcggggtgggggtcggggtagacgacgggggaggagtgtagccagagggcaccagagtgatggtcttggtgatgcagtcggctgtggcagattcagcggcgaacgcgacgggcgcgagggccgagaggaagaggagagccttggtgaactgcattgttgatgtttgttgtggtttaaggttatgatattgagagttgagagttgcgaattgcgaatgaagagtaatccgagtcaaaagagtgaatgcagcttataaaagagtgtaatagctgggagaacaaaagagtgacactgtttcaaacaggagaggttgcaaattaagagagaaagacaggggagtaaaggagaaggggtgtaggccaaggccaaggcgcttgttcaaggcgcttgttcctttaggaatgggccaggtacccaggcagcaaggcatcaaaggagtaagcaccaaggcatcaaggcatgaagggtccaagactagtccgaattaggtatacatatatactaaagtcttcccccttttcatagttatatcttctataaagactgaagaagcgggtgaatttacactattatcagacagtaaggccgtacctcctgttcttagcttcattgtcacaatctagattgtatacggagcacagtttcaggtaattcaatatcaccttgacattatgagaagcaaagcgcttatagatataaaaaatactgttgtacaggccaagggcaagttcccaaaccggggtatcaaagtaacagcaaacaaccatcccaatcatccttaatcatagcatcaaagctcatcgtcaacacaggccagatagggccataataacccagcagtcagaaagcaaaaacacagctgtcatttagaatccccatacggcggccactaccacagcaactgtcacccagtacccgctagcatgcaggaccattgcgacaggcccggatgccgaggaagtactagtcgagcttccgtcagcggcagtggtaccgttgggcaaggtaccgttgatgtagatggtctgggtgccgttcacatcgaccacgcgcacaagactcgagttcttgggcacggtgccgttgaagagggactcgtagtatgtgctgttgttgttattgtcgcagccacactccgagtactgctcgcacacacagacaacggggagcgactcgttcttgtgggcattgttattgtagtagttgtagtgctggctgtaggggtaggcgtaggcgctgtacagccaaagacccgggaagaaacccagtgcggctccaccgagcacgtagggggcgatgcctccagcagaccgcgagccagacgtgtagggagtgcgcgcaccgccagcatagtagttgcctccaccgtaggttgctcgagtgccagagccggcgctggttgtaccaccagcattgcttgttgaaccaccgcgactgctgccactgcttccactgctgccactgctgccactgctgccacttgagcccgaggagccggaagaaccagtgcggcctccactgcttcctccactgctgcttccactgctgctgccactgctgctgccactgctgctgccgcctcggcctcctccgccaccgccacgccgtttctcaagcgttataatatctgagctgtcctgggtagagtccagggagtccacatctcgttcaataagatcggtagactcggtttgagggatagtcagggataaggccctggtggaaagtagaaggagcgttgtcgcccaagtgaacttcatgatgaatccgggacccaagtatcgagtgatagaatagaagaatagagaaacagaagatctcgaagggcgtgagaatcaaaggaaagtccggtaaaagcgaattgaagtagagtcacggtatgacgaaattccgaggaactccgactcctcaagggatttcggagccttttaaatctttgaagtgctaagagtccttagagttaagcaattacagcatgaatcttaaaaagaaaattcatcaaagccaaaccaactcagcctcggaccctgaccctgacccgcacccctttagcggcccaagagcggaatacgaaaacggtggtgaatatttgcttggcatataccggtattttgtatgttggagacatttgtttcaatataattgtgctggatgacctcatggggtggctatcttccagtatacactttgcttcgcctcattctgtgagccctcgaagttggatattacttcatgcaatcttaaaccaacggcgctcatctgcgccccgtaaatggaccaagaaatgagtttctaagcctcaaagtttcgagaaaactctccacaacatataaatcctttgttatagagtaagatgaggccgtctggtcctatagatcaagacaagtgcgccttgtttcaatatttggcatttcagtggttatcaacttattccctttctaatttctataaaagatgattccagctttacatttgaggtttcatagccaatcaatagggcattgttagtagttagttatcaatagatagtcaatagttagttactacgtcgtcaaatagtgggacatcaccggtcggcacccaacagctttcgcccgagtcaaagctgcctttctctttatttcccccaagaacttatttccctctcatggcacgtcaaagaggtctttcaaatgcctcctccacttcatccctccccgaccaagtacaaaaatcccctattcgtgacccggcccgcagaccgctaatgcaatcctaggaattggggagcatgtatgattacctcgccaaagtcattctcctaggaccgagcggtgctggaaagtaggtatcaattatatcgatatgcaatatggtatatacaagcttagatcatcttattgacacccgatccttgtatcacaggtcttgtgtactacaccgcttcgtgaaagacgaatgtacaaccacccctccaacctcactctagctccccctcactgacacatcttctctccagggcgagtactctcctctcagaccatcggcgtggaattcgcctcgcgcatcgtgaaactcggcacgggctcgcgccggagacgcatcaaactccaactctgggatacagcaggcacagaacgctttcgatccgtttcaagatcgtactatcgcggcgcagcaggcgcaatcctcatctacgatgtcgcttcctacacttccttcgcttccctgccgaccttcctcatggacgcccgcgccctagcttccccgaacttatccgtcatcctggccgggaataaagctgacctgacctccgacgctcagtccgatttcgaagattactcccgcccccctccgactccaaccccgtccagtatttccagcagacagtcatctatcccttgggatgcgaatgggtcaattcgctcgactagcatgatgggtacggggactaggttgacggctacccgtgcctcagagggcagagaggtgagctccgaggagacatcccgctgggctgccaagtcgaatatacctgtcgctgtggagatctcggctctgacgggggagggcgtggaggaagtcttcaatcggctggcgcgtatcatcttgaccaagatcgagctcggtgagatcgaccccgatgacccgcagagtggcatccagtacggagatggaggtctgtatggcggcagtgatgcttcaagtatcagaagtcgggcgacgttggacgataattccgtgccccttcagcgcaggaatccccgtcgaaagggcaaggctcctggcacacctagctggaagagcgggatgagggaatgggaggatgtcttccgcttgggctctggaagtcgccccaatcaagggtgttgctagtattgtggatcattctacatcaccctgggtacatttgtttattttctgttttgatttggtctttggtttactacactgcacgataccccctcgttgaccttgatcattcaaatgtttctacatacttgttactttatttacccgacagctcagacctccaagaagaggaattaattgcatataaacttttgattcatctctcgttcaaaatctgcccccaaaacaacgccccgtcatccccaacgtttcgtctctcgatttatacatcaatgccagcaatcaaggtcttaatgcccttgccagccttgacctcaacaaaggccttctcagcatcctcgaacttcactgtatcggtaatcaacttcttgacatcgacactgccggacgcaaccagcccaacggcaagcttgtagtccccgctaccatatcggaagctacccttgatggtcagctccttagaacaagccgccatgatggggaatatgatctcgctgcggcccatgccaccctgtacgtatgtgcctccgttgcgcaggacatggatgcccgtgtgcacggaaggctcagcgcccgaagcgtcaatagcaacatcggcaccaaggccgagcccattctcctgtctcagacgctcagcgttctcagtggccgggacatttttaggcatgaatgtcgccgtcgtggcgtagtccttagcaaagtcaagacgcttctgttggatatctacgacgatgaccttggaggcaccgaacgcagtcgccacggcgcagcacagcaagccaacagggccggcaccgaataccaccaccgactggcccgggctgactctagcttggcgcacaatgtgcaccgcgacactgagaggctccatgagcgctccctcctgtagggagatgcgctcggggagcttgtagcagaagtcctcggggaggacatagtacttggccagggtgccgtcgtagggcggggtcgcggcgaatctcatgtgctcgcacaggttgtactttccggccttgcagggctcgcatcggcggcaggggatgccgggctccatggcgacccggtcgcctaccttgagggactggacggccgagccgacttgggtgatgacgcctgctgactcgtgtccgaggaccatggggtctgtcacaacaaatggaccaatcgatccttcttcccagtagtgcacctgttgcggggattggttaggctggtgggtcatactgttttcggggcatacatacatcactgccgcagataccggtgtacttgacgttgatgagcacatcgtgaggttctttcagctcgggaattgggcggtcttcaaaggtaaccttgtggacgccctggaggatgaatgagaggttctacatggctgtcagacttatcctgtacgtcattctcgacagtcctacctcaggtgtggccattgtgtatatttagaggagcaacggtgggaattccggggaaatcagcaacggttgggggatggagggaagagtataaggagttaatggagattctacacgcaagagaggaatatatatctcgaaaagataaagggatcgggagaatccagtcgaattgaattgaaccgaacaacgcagagctccccgcaggtccagacaagttccactatgtggatcagcctctctttctcttttagccgcgatattaaccggctctcggggcttttggcgggattttctttcctcgatgaagtcacaagaggcaataaacatcaggccatgtgacccgccagtggccgccacttttggtcaagtgacgtacttgatttggataactatatcttcaatacttcgtataggatacaaatatatatgtatggtacttgatataagaagaggtgatttagttcctaattaaaacaacacatataaattcagataagatactactctactactacggtgcaccttatgtagtattactataggtagatactatgtattccagggcttgtagacctttctcagccgaaagctatcggccgaaacgccaagacccggggattttgtccgtcctcaagctctctctcttccttcctctctcctctctctggtagcttagagcttcacttcttctacacattgcaatggtattcaatgccctcgccctcggggcgcgtagtcttcggactcgaccatcaccccgtctggtgcgccatttcgcagcttccgccaagcaagcaaaggaaaaccaatcattcaagagtcaactatatgaaagcacccagcagcgcttgaagcgcgagcgtgccgaacaggaaaaattcgcccaatatcagactcaatctcccgcgggtcgctctgccgctctgatcttcggtatgcaaagctgagataacttacattgtcctctggatcggtcagctaactagacctgcaattgcgctgtagctttggttttcttctcaactggtgcttactacctcggatccctcaagcccgcagctctgccaacgacatctacgactcccctctctgatatcgggcccgcaaaacacaacgtctctatctccaacctccaggcagcgtgggccgatttcgtcgagatcttgggcaaggaaaatgtttcgacttcagttggcgacgtggaaatgcattccggatccgattggtcctcctacacaccgaaagagggcgagaagcccttcttgatcctctacccgtcaaccaccgaggaagtctcgcgcatcatgaagatctgccaccagcgcattatccccgtcaccccgtactccggcggcacgagcttggagggccattttgcgtctactagaggtggcgtgtgcgtggatttccgtcgcatggaccgtatcttggcgctccacaagcctgacatggatgttgttgtccagcctgctgttggatgggaggagttaaacgcggagatcgccaaggatggacttttcttcccgccggaccctggtcccggtgcgatgattggtggtatggtcggaacagggtgctcaggaacgaatgcctaccggtacgggacaatgcgtgagtgggtactgtcgcttactgttgtcctcgccgatggcaccattatccacacccggcagcgcccaaggaagtctagtgctggttatgacctgaccaagctcttcattggcggcgaaggcactcttggtctggtaacggaggcgaccttgaagctgacggtcaagccccagagtgagaatgttgctgtcgcaagctttggcaccatccacagggctgctgagtgtgtgaccaaggtggtggaggctggtatccctgtcgctggtgttgagattctggatgatgtccaaatgaagtgtatcaatgcaagcggtactactagccgtcagtggaaggagtcacccaccctgttcttcaagttcactggtaccccgaatgcggttaaggagcagattggtttggtgaagaagattgtgtccacaacttcgggaaatagcttcgagtttgctcgtgatcaagacgaaatggcagaactttggagtgcccgcaaagaggcgctgtggagtgtcctggcgatgaagaaaaacccggatgaccacgtctggacaactgatgtcgcggtcccgattagcaggttgcccgatatcatcgaggcgaccaaggaagatctgaccaagcatggcttgttggccggaatctgtggccatgttggagatggcaacttccactgtaagttattgcctttatactacaaagtcgttggacatgtattaacagccgacagcgatcatcctcttcagcgagactgagaggagcatagccgagggagtcgtgcaccgcatggtgaaacgcgccgtggagatggagggcactgttaccggagagcacggtgtcggtctcgtcaagcgagactacctcgagcacgaggttggtgtaactacagtggacacaatgcgccgggtaagtcttgacatacattctcattcaaccccagactccaaatacacctttgtctacacccatggagcataccactaatactcatatctgcactagctaaaattggctcttgatccactccgcctgctcaattgcgacaaggttattcgcaccgaacaaccggcccccggagagatcaaggaatggtagatgcctcgcccttgacaggatttatatatccgagacactgctgaggctacctactccgaatccgaaccggaatggtgatgatggtggtgtcggcggtgtcgatgacgttcctcatcatcgctgccagagcccgaaccgtgtctggggcgctcctcgccttcatattgtcgttcggggcggtaaccatcaccgccctctcgctcaccatatccttcctgtggccgatagccggaattctcaaattcattgtagccaggctgcggtctaccatatccggaggactccctgtacatcgtggttaatatatgggactagccaataacaactgatgaagtcaacttactgtccatattcctcacggggaggtgggcctccatatccatattgtggctctgtacgctggtatgggccaccttggtagatttcccgtggctgctcctgatagtaactctgactctccgactggtattggtggtgctgctggcggaaattctccgctggaggtgcgtagccggagtactcatcgcgaggcgggggtggttgttgatagacagtttcactttgatattcgtatccgtcgggacgaggacggtattcttcgtggtgagccacgggctgaccgtagcctccgtagcttggttgtccatatccgctctggggttgactatatccgctctggggttgactatatccactctggggttgactgtaggagtcccctccatattgctgctggctctcatgttggggtcgactctggtaagaattcccgctgtcatagttttgaggctctgggctctcacgatcaggctttgagccgccgttgttgagaagcatagagcccatgcctcctacgagtccaccgagaataccgccaaatgcgcttcctcccataacctcggaggcaagattctcaatgccaacggagtcaccggacgcttggcctccaccagagctgccttgagccttgggaagagcgagcggcttgccacatccgtgtccgcaatcttgcacaccatctttatgattcctgccttcgaggacaccatcgcggctcagctggtcgcggaggacgtcacgctcctcgtcattcttttcgttccaccacttttcgaccgtggagaacatgatttgatgcatatcggcagccccatcatttccagactcacgaagagcggggtggtggaaaacaccagaaatgattctgtcaagagttcggtcgacatcgacattctcgtcgtcccagcatgacatgagctgaggaactgcccatttgacaaccgctgacgcaatacgaccagcgggctcattcaggatgtttgagaagtggtcttttgagagcattgagtgagtcgggtttgagcagctgtcgtcgttaaacaccacgtgctgttgctcccggctgctctggatcacctcggatgaaccggtttcaagctcggccttgacctgcttgatgatgggaaggatgtaaggagccagaatagagaagacaaaaatggtgatttgatcctgaatttgctcgatcaggtcgggcaagattggaatcttttcgatggccttgttgatttgtttcagcaggttgtcgtgccactcgaggactgggtagatctgcttctgggcgttttccaggtaaagagtccactcttcaggatcccgaggagtgaccttctcgccgtcatgtttggcttcatctgccttggacttgaagtcatccatcttgctggtctggtcggtatcaccaagcaaaccgtcgggaatcttgctcagcagagtctgcaggaaactctcggaggaatcctcattctccgattgggcgacgacagtctccaaggactcaatttcagactgcattgtcttatcggacaactctcccagcaccgaatggaagaaatccactccaccaaaggtaccagtcacgattggatagacttcctcatcgaccccgtcaacctgcagtttagtgtcgcgtccgacatgagggaagacctcggtctctcctagttcaatcaggctgagctctgtgtagttggagtgcgcagcataatcttctaggcagtgcaatccagtgcccaacagtcgcagagcttcatataagtcgtccttgttcctggattggccatagcgccggcccatctgaatcgagcggccgagaacacggcgaatcagcgcggccgagttgtcgatatcggcatcctcagttgcgatgtagcgtttcaagcctgtgtttcgaattggttagtccaatatcgaccaccgtgtgatcaaattccataccggtccgggaatcgactgcaagttcctgctcttcgtcaacgggaccacgtagtcgcggatcgtagtcacgcgcatcctctccggtagcgtatcccaagggattatcgatatgctccgtaggttggtaacatcccaggcgttcagtcgtaacctcaaactctctggttccgtatcttttataggtcttagcgaaaagtcgacagtctcgatatactttcacaactcacccaaagctcatgaatcccagcacccacagcaggatacggatggcttcggcactaacgtatttgacggtgcccacatcgactgcttggctgtaatcacgcagccaattaccgaagtagacccgctttacatccagcttgccgaatttcttaccaccggcgaccctcgccataagcagagtcagaagggtatcctcaatgtctccatgacgccagttttgaccttcgaggcgggaaagcgaggcgatgtttccagcgccaaatgcatatgcctggccggagaaagcgacgagtatcaagagggtcaaccccaggttctgcaaagacagacccatggttggagaaatggtacaatgtcggggatattttttatgcaaaagcaagggaagaaaaggatgagaagaaaagaagcgagagaaagagaaagaaacaaaaaagagtcaaccccaccatgtacaacacacaatgtcaaacacttggtgggatgaagatcatggtgggcttggctgcagcttggcggctgtacgtatacggagtacatgaaggtacatgcggtacatgtggtatatggagaatacatgaaagattcaagtggagattgtattgccaggtatatcgtgtaaatgaggtattagggagaacaggggcgataaaggaatagattaaaataagatgagcctaggcaaaaccgcactagcgcgacgaactatttcaaactaatcaaacgatcaaaacgaatcaaacgaactagaagaactagaagaactagaagaattagaaggaatcatccaataggaggccgagtgggtaatataggggaagaataggagaagtcaaagccgcatgcggtctcgatcccgtctgtctccggcttcaccgccgtctcctttttctcttcgactgggaatatatctactctcggttttttattacttcattacttcctttttttcctctctctggcttcgaactcttctactcatcggaccctgtctcaaatgccagatcctgtatcttccccgctatagagcgcttatctcaaatcttcacttcccccgctgatgtgctgatgcgctgatgcgcccctcttgatcaatcttgatttatcttacgattactcctcttttctcgcttccccactcatccttggcctggaatcgagctgtcatactctgattcccctttagctcctgtggacaatcatgcatcacgcgattcattactaaaagccgtgacttaagagcgttctgaccatggcacgcgccgacgattcatactcccgcgagtcggccttccctgtcatgaaaaaccgactggcgggtgaatctggatccctccagcgccctgtaaaggcgagaccaggcattgaaaccggacgggctacctcctataggtttccgcctcgagatctcaacaactcccaagatcaattcccattcgaggttgccgacaactcgcactcccctatcagtctcaagaagcgcaactccatggcttcaggcatggctatgcatggtaccacaccgggcgaacaaccgtggaattcggaacagaacatgaatatatcctccgacgccctcgactctcgccctcacaaaagcaaatcaataaaacccaaggtccacatcaagcccattctgcggaaactctcccgagatgatgcgccgtcgacctcgattgatttgtcccgatcgtccactgaacaagaggggctgggcatttacatgaacctcgagcgagagtgcccacgcagcgagcccctcgcaggtgtgaattttaagagaacatcctccggccttcaccatcgatcggccagtggaacatctcagttctcaaatggctcaggctccagtgcgaccaagcccggatcccagtacgtgcatcccatgcgacagacgcctcgagcgtacactccaccattgggccggtcctacgaggactcaaaccgggatagcgaagaactttatgaaagccccgagtcggaaccttcgtctacacaagaatcccgtacttcttcaggcccggcccttccccggctgtcattgcagattcaagaagattctttcactcggctccccggggtttcacagaccaacgtgaccagtcgaccgtcctttgggtactcgcgggaggcggatggaactacatccccgttgtctagaacgtctctcgacttcgttttccgatctcgaacccgtactagcaccgatcctatttcgcgtgcagccacagttcaggctgcccgccaggcatttgaggaaaaagaagccgccaaaaatcgacggcttgaaaaacaacagatcaaagctgaagagagaggcccccggcgtctcttgaagcggcacacgtcggaagataatgagtctcctgtgcagtctaaagaggagatttctgaaaagccccaaagacccgttttgcatgggaccgaagagccatctgcctcatggaaatcccaatccaaaagcgcatgggttctctttatgacctggcttcgaactagagtgttcaaactgcgacggaagattaagaaacttcgttgattctgactccttccgtccaggttttcttttttctttttttcctttgtcttttcctttgttccgcccctttcctttttgttccaagttcatacttcaatgagcgagcgatttgattgttcccctggtgttgatctgcgagtcttttttgcacctttatgggaatatcgctcaatatgagcagatacacggcgtctggattgctgtctttgcaacgtatgcgtttgccatctctaggcaatcgcaggtcgagttgtcctagagatattgacctagcatttccgagggcattttattttatgcatgggaaatgagaaatgtgggatctgcttccccaatggtaccaaaccgaattatgaaatgaaattcataccattagttattcaattgtgctttgtaaatgtaaacgtcagatgttgtcaatgttgtgtgaagggatataattgtagtcacgtgccaaactgcgctgtccgcgtcttccccaaattcccccgaagactacggcgcacagcagcgacaacaaccgcctgataagctccacaccttccagctctatctatttcttttacagacgcacctccacggaggggagcgtctccttcatcatggtgtacgattggtctggcaagcgggaaatctgcttccagatgtacattcaggaaaagaaggcgttagaggagatcatggactacatgcgaacttcttgtcagtttgcgccaaggtaagtgtatatgtccttgctttcatttgtaggatactaattgattttcatcacttctctagcaagcgtgcctttcagactcaatttaaacgatggggctttccgtcgaaacaaaatccagcacacaagaatattgaactcgtcgctcgagtcaaagagctttgggaacggaacacaagccagcgggatatgcttcgcatcttgaatgatgaaggctttgagattaaagagagggaattaatgcgagtacgcgcaaagaatcgatggctgctgcgagtccccaatggaatgaagtcacagtcgaatgtcgaggaagaagaagccgtccaaccggaagatgagggcctactcgccttgcagcaggaggtatacaaggtcgaaagcgtactcgataacccgcatcatctccctacacagccagatgaacgcccaaccaacgagtcccccgctctctcaccagaggtcatcgcaaaacgccaagagcgactggaacgcctgaagaccgaaagtgcagaacgttgggcaaacagaaaacgtcgtcgtcgaactcgaggatgggccgggctgccagctgaccctccggggcctccacgctttccgtcggagacaaccatcgacgagagcaagcagtatctcaacctagacaacaccatgtaccgccagaccagggaccatttccagcgaatctgcgaagaagcaggctttatcaagaaaaccgcagccggtcctgagagatggcaagctgcgaaagacaaattgatccaagaatccccacaccttcaacaggtgtttaatacagatcctaatcaacgcgatgcaaaggcccttgcactcgatgttgtgtgtaccgatgtcaccaaacgaatgcggactctggagagacgcatgacaatcgcggaggcgaagaatgccctagggatcaacccggaggaaagtcgacagattagaaatgcgttctatgacaccttgaaggtggatcatttcacaagcaagttagaggccggcgatgaacactggagagagctcaaagagcaatggattgcaaactcagagctgctccagcaaatcctcgcccctgggccagccgacccagatcacggcaacaaactaaaggctctggaagtactctgtcgcgatgtcatgaagagactccgagacgaccagacgaagcgagatccggcacgtaggagatcatcggcccgtgccgggtctcgaaatcaaaccccgacaacctcctcgatgggcagcatgctaggcaacgacatcagcaatggaattagtactttggcctctcaggcattggccagtgcacccattacggctactgatattggcgatatgcaaattgacccttcactactccaggctgcgaacgacccatctttctcggctaatccacaccacgacgcaggcaatggctttgaatatgtggatcctatgctcagttccgcactattacatacccccgtctggtgtcggattagcttgaaggaccagtcgcaagaaataatccgaaaaccctggctcgaaaagctagccacacgaacagtggaagaactccggcaattgatcggcgccaggtatccatactcaatcatcgcccgaatcgagggcattgacagggatgaggaagggaatgagcttctcttctcaatcgacgatgatcatcaattggatgcatacttgactcatgttcacggaaggaaggcgttgctcgatttcacctttggacagatttgaactctcggccctggtggcaaggcgtagattcggttgagctaaacagcgttattacccccaatgttaggataacaaatgaaatttactgtagggaataagataaataggacattcttccttagatattaagtctccagactcaaaggcgcattactagatccttaacaccaccatgacttgggcttgtgtagtaaaagataaatcatgaagtttttggggggtacctaagtgaccatatacatatacaacattgttcgctgttcacaattccaatgttcaaaaacagaaaaaaatccctatcaaccgctacacccgtgcaccgaataagaaaccgccgtggaccaaaaccatcagctcagttggcgccgagtgtttggaccacgttcctgaagaggaccccaatagcaggcaaggagaatgatggagtctcaccaaagacactagccagtcccttggtttgagcagaaaagtcctccacgtcgtcggattgagcgaggagcctctccggtcctcggtggaagagagttgccaatccattgtcgatttggccggtcacatcacgggactggttgttctgactcttctgggaagccttgtccagacagccaagtcgttgtacagttgccgtggaatcaacgacgatgtaatcaccggaataggcatctgagagcagcgcaaccggggagctctgcagggtttcctggaagaccacctcgaaggatgggacgtcgtagatcttgatttggaatcggaccttgcggcgtttcttgtgtgacgaactagtaacaattgccaatgtcttcgttctggcattcacggcaatgagctgtgagttgccgccgggggaatccacagactctgacgactgaatggtcttgacgacatcgtcgactgtgtcccagacagcgaccgagtgagtagaagcaacgatcaaatggcttcctaggaaactcgtcgagcaggggtttccaaggaaaacacccgtgcgtcggtagtgcacagagcagtttcgcgcatcgatcaggacaacaagaccatcatttgcagccggtgtcgacggcaaacacacggccaatactgagccatcctcggagaaacccatacaagccgcctccagaggggaatcttcggtggaattgagacatccccgcaggtcaacggtaccacgacacttccacgtgttcagaggctggtctgcttggtctttcaccttcagtccgtttcggtatttcgcagttgggcaccagaagcgcagaacagagtcggcacctagggttgcgaactcgtgggcaccaggccgggacaccagaccaagtacagctgagtgatggtttttggagaaatgaggaccgtcgacacgggtgaccagttcccatgtatcagaggaagcgtcccacttccagaacttcaagaagacctccggacggagggtggcggtggatttagcattagaagagcgatctagggcttccacatcccgaggatgaggggcccaggtatcaaccgtagccaaccacttcgcatcatgcactatatctaagtggttgatatcgggtgcgacaatttgagacccttcagggctgacgctcaaagtggtcgcattggttcgcgcaagggcttggcgggaaatattggagttggcacggatatcgtatgtctgaagcacagccgcgtttgcaggctgagagccatgctggttttgagtaagctgatgggaagctgggacggccacaatcaatcgctctggttgctgcgggtgcaatttcgccacaacagatccccttgaggattccagagagccagacatgtctgggcacaactgcaatcctgtgatggtagtaagaggttgcaattctctcgtcgacaggatcatgactgaattgtcggccaatttaaccacatacgagctgccactggcggatacgacaatgttgcagataggggaggaaagatggggaaggaattgcttccggccagtgtccaattgccagagaaccatgacggactcctgaccacccgaaataatgtagtttcctgatgaatgtgagcaatctctctctgataaacatgtgtataagagtggacataccgtctttagaccaacgcacggtgttgacagagccgcggtgccaatgcagctttctaggcgaagacttcttatcgccgagatccttgccgaagaggacattcaagacattctggtacatcaggatagaaccgccgctctctcctactgctagatcgatggattccgagccttgggcctggatgtcaaagcaagtgacattgacaggaagggtcgcctcgcgccaggcgtattggacagtctcaaggttctcgagctccgcgctggttgtagtacccataaagagatgcttaccatcactagcgatgatcactcggccgtcgtgggtgaccttgatgctattgattttctggctggtctcgaggacggtggtgccttggatcttattgtcctccagtttgttgatcaaaatctgcctttttccgtccctttgcgatatgaccgagaaggaagtagcagttgtgcttccttctttccccaccgaggccagactcgttgaaacggctgtgcaggtagtctcccagtgtgcgatgcgctttccggaactccaattccacttgctgatagagcccgaagacgtaaagatatagaggctttcttggtcctcgggacaaaggccgaacccaatgatctgttggccagcctccatttgcaatgtacgtgacaggcgagaggttgaggttgcgaatacttgaacggcggtgtcgagtcccacgaggagatatctgcgatagaaaaaggtcagaatgcgtctcactatctgtcggcagaaacagtcctcacgcttcatcatcggtcaaaattggatctaaattgttgtaacgaccgccaacagggcgcgagaaagaccactgcgcggggcttttttgcttaatctcggcatcttgtatctggacatcgccattggaaccctgtttcacactatcggttggctcgaccgtctccaggctctggttttcgttggctcctgagactctacgccttttgggtcgctcttcatttgaccgggcgagcttctcggaggccgcatcgctgagccgagatcgcttttgctgtcgtgcggactgattggccgccatttttgcagatgaggcaggatcgagaaagagaagaaagaacgttcaaatgttagctagtgcgactcagacaatcatagctctcgcaaattgggacacagttgcgtagagttgagtctggggatattcatggcagatccgtctacttttttttcccaagggaaaaataaggcggggattgctggcagaaaatggaagttctcctgattgggttagatcggccttcaatcttcgcgggaaaaaaagtctggctcaaagcgacattattcacctccaatcgaatcacctcctaagctgaatcgctgaaatgattattcctgtccgttgtttctcctgtggcaaggtgagcagctgttttttgagtgcgtgatgtatgatcatttgctaaactcctgattgtaggttgtcggtgacctctgggagcgttacctgcagctcttggacgacggtgttccagatgggtatggcagcctccagtctatcacacctgtccctggctaattaactcttttacagcgatgctatggaccagcttggctgcagacggtactgctgccggcgaatggtcatgacccacgttgatctgatcgagaaacttctccggtacgtctcttatttcgagattgagtgattgttgctcattttgtacagttacaattccgccgagaaagatcgctccaaggctcaggtataggccaaccaatctctcacacgaactcgaaccgaggctttcctgtcaaaaaatcacccgaataccccattatccctaccgggtcgtgctagcccgaccgctttttcacgttcggctaaaagatattgggagcatattgaagtttgcaaaagaaggaactccagcatcttaagcttaatgatgtggtcgttggtgttggctggtctcaacattcaaatgctgccagttttggatctccctggggcagtgaagtggtttgagatgcgacgggtgacccaggctccaccggagatgggacgaagttacccacaggtgtttcttccggtatttgcatttagggcggcgttgcactctacacatatggcgccaagggaggtatctgcgttttggttattactgtcttcaatgaattttacagctcagcggtttgcaatctgacccatcaaattgcaaaatcaccatttgtagctcaacccaagtatgtgtttaaacgccactgcttggtttgtccttcgaggaacgttgggctgttgtggccgatttctctcgtgcattatggccctctgttggctagaagtgtagtcgttgtcagacttacagagtgaattgattttctggcatactcagatattaggaattgccatgttcctagcagtgtacaacataatattactccggccaaagtatacattgaatgtctaacccgatataaacgggcaaattccccgcttggacgcctccgatgatctcaacaggtcgagacctcattctagatctgcagtatacccaacatggatttatcagtcccgggttgacgggtatgaactgttggtttctacgattttggattgatcttgggatttgagaaccaaaggcgtctagatagtccgaagaacgaaccaatcctgagagctacaacttccaactcataaatctctacccgagggggccaaataggcgccgtgatgaacttgcatctcaacctccatcggccactcacatcgaggggagctgcatcagactataccgcatccaggacaaaagcgctttcatcgatttcagccaatcagagagcgcagatgtattacaataatagctatacaattacttcacagtacactttccccaatgcctttctttctgcagttggttcccaattggcgcatttgcatattgagacattgccaatgtgaaatggggactccacattcattaccatatctgatatcccctcctcccatcctaaccatccaagtatgaatatgtattggagaaacagatatcacgtgtagtatacgctaggtaagcgatgagggaccgggcccagctccctcaagtattgctccccccatcttttttttgctctttcactcgagctttgttttcttctattcccgtatacattcggccatggccgttaggtcgccgctatctgtcttaccataccgcgtcaacgccgcaagtccggcttactgttccccgcgctcggtttcaatgtaagaccagtactggtttctctaagaccatcgctgatgcgtaaacaggtctcttgacggggtcctcgatgggaatgagaatccccgcctctccgcctctgagccgataagcagcttatcaggggcctcggccaatgaagaggatggcgatgattgtgatgattgcgacgattcaaatggagaagataacgctactgaacttatacgtggatccgggggcccttctcaatcagggcttacagtatgtgcgatttgcgggctatacacatttcagttggattcacaccatatagattcaaaccgaatacccaaatcattcgggaaacagcacaacatcggacgacgatgaacctccgcagtcggtgatacatgctccgccaggatttgctgattttgtacgaataccatcagaactgttgccgcgttggctaacggtgaatctatctagacgtcaatacagcctactcccaaggacacagaggagtcacagtcgccatcagtcggtttgaatgagcaaactgatgtaataaatgtgcctacaaggccgagaaaggtattttcatgatagccctcgcccggttatatatggcgctgatgagttctatcaatacagttcggcaatagtccaatatcgccgcctccattgacaacatccctcagtctcgacaacgattgtaccgagcgagcgacgccacgtgcgcaaacaagacatgagtttgaggaattcgagagacgtagtactcgttcgagtagcttacaaggtatgccgatttttttcaagtcatactttcatccatgatagcccttactgaccctttttcaagatatccccgaaggtataaccgtgaacgaaacgcattcaagctctagcatacaagactaattttaatccaggactaaccagcaaagaggccgaaatcaatgccctaagagctgctctcgacgaatgctggacactgtgcaatacgctggccaatcttagttatatccatcgaaaacgtctcctcaaaccccaaaattatgatatgcaagaggatgcatggcggtcatgttggagactttgccagaagctttatgacacacgcgacgacgactacgcgtcacaaatccttccgactcttgatctctgtcgagatttctgccaggcgctatttgaggcccgtactcgcgacagcgacttatctgactcggtcttgcgagtgagttttgaattgaacaatcatctttacaacactcacgatcggaaccttcccgatgccttccgtgaaagaactttggatttctacattaccttgtgccaccgtctcatgaagcagcgcactcgcatcacggagacagactctctgctgggtgcatgttggacattagccgagatgctgttcagtattcgccagagcaagagagaagggaagccgctggatgaggacttgctagggtctgcagttcaagcctgctgggagctttgcgatctgttccgcgagggttggaccctccataatttgcgcaactcggatcggggaacaccccggccgagccaaaccacgttctcgcaggcattccatcaaacgtcgcaacagtcagagctggatttcggtgatgacccaatgagccaacttggcaaccccgagactccaaccaccatattcgaggacactgcaacggcctcgcccgacgacactccgattccgaatatactcgtattgggctatgggaatgggcataataacgctcatactaagtggtcatccaatgcatccagtatttcggagcagtcccgatcatccgatcacacagcatcctcggccaacacagtgaccactgtctcggaggatcccaacctcacgcgattaaagatcctgatcaccaaagctgccatcattagtggatatcaacggggcgggagccagaatctctcatcttttgtgaaatcactaccctcggatgcgtttggctccgcggcctggcagacatcattattgaagaattatagaaaggtcgtggcatttgacccggcgttcagaagtgttggtctgcaagcccgggtgagtgccattgatgtcgcgcatgcatgccaggcaatgctgcaaagtggccagtactcctggctgcgtgacctctaccggctcgtcttcgggttccatattgaagaggcgatgggccgtaaaggtgtgattatccaaacatagcactcagttccatcatatgtcgctatctagtactttttctgatgagttggcatattcaacgcggtcgacattcgaagtggggagtggggactaggtgactcttattttgtacacaacaccagtgatcttgtattcctcgtggaatattcttccctgagtttcgttggagttggggctgtgttaaggtccatttgtcaatctctttttcagcctcttttacccaagataaggcatagcaggggtatatatcaataatacatcaatgtccgaattttggcccattaaggaatcactgcttgaaacaaggaaagaaaaaccagggcaatataattctgttggaccatatagatatggatatagatatacgtagtagaactatattccgtaccaacttccctagtcaccaccaaggaaaaaaacgaagaatttcattctcagccaaaaagaaattggcaatcttctttggattagcctcagttaggctgactcttagcatatgcaggtgagatggctgatttgtgaattttgcccactttcctctggtctacaactgtcccaggcttgacctctatctttgcttttttttcctttttccttttctgtttgcccctttttcctaaattatcccagtctcaagtttccaggcatcgtgaacggacagacatagtccgagacgtatttatgccgtctcgcgcggagagccatgtttgtataaatatctttcgctcctcaccagggaatgttctccttcactttattcttctatgcattgacctatctcttcccagataggcactcagtttactatcattgaaacatccttatatccttattgggtcaccttgaaccatcatggttgttcccaccttcgccggcatgtctggcaggctcttatcgcgtgcagttaccacaactgcgacaatgggtttcctactattcggatatgatcgtatgttttgtcatcctgaactaagcactccactaataatagatctgctacagagggtgttatgagcagtatcattgatgcttcggacttcactgatatcctgaccgagttgagaggtaattcgactatgcagggtaccgtcactgctctctatgaaattggtaagctccgtcgaggatttatgtccgccttagtttccagtttgatactaaagatttatctcagggtgtctttttggtgccatcttcatgctcgtctggggcgactggctcggtcgtcgaaaaggtatcattagcggcgctatcgtcatgatccttggtgttattgtgcagatcacttcttatgctggcaagcagcctctcgcacaatttaccattgggcgtatactcactggtgtgggtaacggaatgaacacttctaccattcccacctaccaggccggtatgtattcaatgaatttgcatggaatcttgttagcatagagaaagtcgactaactctgaatttagaatgctctcgaacctcaaatcgtggtcttcttatctgtatcgagggtggtaccattgcctttggtacactgattgcttattggattgactttggtgcatcatatggtccccccgatgtgatttggcgttttcctattgccttccagtgtgtgtttggattatttattattgttggtatgatccttctacctgagtcaccgcgctggcttttcacacgggaacgctatgaggaaggtgagaaggttattgctgcacttctaggcgccgaaccagactcccacgaggtggccctacaaaagaacatcatcatggattctatccgcgcctctggtcaaatggggaagaccaccccaatgtctgccgtctttaccggtggcaagactcagcacctccgtcgtatgctccttggagtttcgtcccagctcatgcagcagattggtggctgcaatgctgttatctactatttgcctatcctctttagagactcgatcaagctggaggggaagcttccatctattgtcggtggtgtcaacatgattgtctactccatctttgcgactgcttcttggttcttgattgaacgagtcgggcgtcgcaagctttttctctacggtaccattggccagatggtctcaatgctcatcaccttcgtttgcttggttcccgacaagtccggtccagctaagggtgccgctttcggtctttttatatacattgctagctttggtgctacttggttgccattgccctggtgtgttttgagtcccaaactagaaatcaatgtgaatactaatgcgtttctaggctgtatccagccgagatcagcccgatcaagactcgtgccaaagccaacgcgctttcgacctgttccaactggcttttcaactttttgattgttatggtaactccaatcatgattgaaaagatcaagtggggaacatatctcttctttgcagcgctgaacgcttgtttcttgcccatcatctactttttctatcccgagaccgctcgccgttctctggaggagattgacctgatcttcgccaagggattttcggaaaatatcagttacgtgcgcgctgcaaatgagctaccttacctttctgacgaggatattgagcgtgtcgctatccagtatggatttggtgccgatgagatgaagcctggtggtgtttcgcaacctgaggctacctaattgttgggtgtggtagacggccctgcttttggcgaatctcgtgcggtactagatgtagaatgctctgatattttgtgttagatgcctatacaagacatttcaataaatgactagtcaagttgcagacagctttcggactcttaggaccagcaggaacatgtgattatgaaggtattgaaaaacatcagcaccaccactctataggtagtagatcctacaccaattgatatgatattgggattgtaaagaacatgaataataccgtctaatacgtatgtagagtagagacgaacaggcatctaatttatcccccccccctcctcccatttcatcatatgctagtatctcaatagaataacgtaagtgcaccgggggtgtacacacctgtggaccctagagcaccgctagatccttgtgaagaagtaaagatatgcggttttcttcatcgcttcgatatcttcaaacttgacaactttttcatcattgaacatcacccatgacaggccactttgacctggcaattgtttgcgaatcatggcaacataatgcctagcatgtgttagtctaacccaacgaagtgagaacgaagacatagagccactcaccctgcatggacagatgtgcctttgtggcatacaattgaccttaattcatatcgagcaggtaggctagtaagcccaaccgagccaccatgagactgtgcgttgtggtcgtcgatactcggtgtttccatttccaccacatcatctgagtgagtgaaaacccaatccagtgccctgttaacatcaccgtcggtcgcggccaaggctcgctgggcacgaggcgcctcaatacccatgtcccctaattgagcgatttttgccgcgtcttgctcattagaactggaggtgccgactggttcaagggccatcggttcatcgatgtctggatcttccatgtgggcaaatagccaattcatggcagtttccggatcagagttgccagtggcatgaagagctttctcacacctcacagcagggaaacccatgcctatgagttgatcgagggctcctggattcgggacaaatgcggtagattcttcaatatcgggaagttgctcctcacccgcatcatgctcaccagcaaggtaagagctgaaatccagtggtttgtcgtcgaccagcacagggatatccaactttgtcggaacccagttgacgagctcaaaccgacgagcattgaccactaattcctgaggcaatgttttgaaagacgactgcttcgaaaagccatcttggctgccacaagcaggacaggtaagctcaacgacctccgccgaagtaaagatgtctagacactctgacaaatccacagactcatattcctttcctgttccgtcagaactggtaataggacgtgcggggacagcaaccgaaacgttatcttgctcatccactttatagcggacttttttgcaatgcaagcactgaagacgctgctcaacctggaagcgaaagtcctggaccgggttaatctgcggactggtgtgtttcgataggctgacagacttgaataaatgaaggaggaattcaaatgcatcttgctgtctcatagttgagaactcctcatgaccttggccaataagatacttgaacattgctggtgctaaacccttctgatgagcgacttctggtatatccgcggacaacataacgcgagaatcaggccgagagtaccggcctgagagtagaccgtcggcaagttttcgcaattgtgtctcaaggtcctgtgctggtgcttggcagagtggtggttcttctgacagctgatagtatcgctcacgaaatccggccacagaaaatatgcattgcatgatactggagagatagcagctgttgccaagattcgccagacctgtaaatgcaggcccaaagacagggaccagctcccggccatcctcggtcgtcatggaaaattcccattttagattatgctcgacctgcatctccatcagactcttctctgtcttctcacgcccagccaaatagattccccagtgcgcaaggtgggtcgctagttctgggtctactctttcttcgttgcacttataacagtagacatcagcagagccttctgctgtgatggagccaagcttgacagccacagcatgtgatgttgagtctgcatgagtaagcccatgggagtttcccttgcttccaccgaattgacttcgcccacaacccttattcccacattccagacacagccagaggttctctcccaggtcacactctgaacaatggtttaaatctgcaatttcattagcccagaccccagttgagtatttcagggaatcaataccagtcgatgcggcatgcgtgttgtcctgttgaaccagacacaatgtatgctcgcaaggcacaaactcttgctcccatgccttgacttcttcctttcttgagaaagtcattgctgtcataacaccttcaatgacagcagggagcttgccactggctttgtccacattgtcttgggggcatgaatagcacaccactgacgtagcaatgtcatatctatcctcttccgtttcggctgcgatggaaagctttgaaatcttcggcgggggctcgtcgcgctataaatcagaggtgtgagaatcattggccacaagtccaagaaatgtttagaggctgtacctgcactttcttaggagtccttcgtatgttcaaagccagtggatggccaaatctcttgtaatgaagcagggcatggtctctgtttccagcacatccaccattgaagcaattcagacagacatttagaccagcatcatcgtccttgcaaggttagtcagacgacatgtggagtggtaggaaccgggtggcatacaatagaatcaaagcactgagtacaatcttctcgataaacagcctggtaaggtcctggcggattcagatctatggagtgttgtccattagctccatttgttcttcgattatcaaggtgatgtcacaaacccgcagcaccggtatggacacaagaggccatatccagagtggaaatctcagtaattcacgacgtgtcaataaagacttcttagcttttaacgaggacttcagaaggtgcgatagtatcccattgaaagtaaagatgggaaaaagacggaatattaaatagtgcagatcaagctaaagctacgatgcgtggggttgctccttcctcaccgcctgcacgtgctcttatcaatgttgtcctgaggcatgaagtcatgtggtgggggtgtgccacttaacgcgttattttcttaacacgcgttccaaccttgtcctccaacctggacttgctctctcaagttcggtcttccttgcttcgtttcttttttatttccctgattcatcccttcacgtcatcgtttttagtctttcctcaagtcttctttctcgactctctcaattattgaaatttgaagtcatcattatcatggcttccgaggcagcatcccaaatcactattggggctctaaggtttgtattcattggtctgtacggcagtatataagctaatcgcgtgtttaacagtgccatatttgatgaaaccaaaccccaagtaccagagccaattgttcaatgcgttcagatcaagaccttgccatctccgccgaaccaaccagaacgttaccgggctgttttcagtgatattgcgaactatgtccaaacgatgattgctactcgtacgtgctttcctctcattactcttagtagctcatcggacttactaaccgctagaagaagccactggggtggtgaaggatgggtctcttcggaagggctgtttcgtgcgactcacgtcatttcagtcaaatgttgtcaaaggaaagaagtatgtgatgcaattctatccattttgactgtgctaataatcacagtatcctcgtcatcttgggccttgaagttctaacggaactgggcgaggctgaaaaaatcggtgatcccaaaccacttgcagtcaaatccgaggaagaggaagtgggtcaaccgacaacaatatccagcaatgggttttacggctccaagatggagggtgcacaggctcagccgaatagccgagcccagccaatctctgcccctatgtctacttcctccgtccatgccacaatctacccgattgaagccgtctccccgtattccaacaaatggacgatcaaagcgcgatgcacaaacaagtccgccatcaaaacatggcacaacaagaatggtgagggtagactgttcagtgtgaatttactggacgacagtggtgaaattcgtgcaactggtttcaaagaacagtgtgacatgctctatgaactcttccaggagggcagcgtttattatatttcgactccatgtaaggtccaaattgccaagaaacagttctcaaatctcaacaacgattatgaacttgtatttgagagagataccattgttgagaaggtaacatctctttcttcataaaccaaatgcgtcgctgacattctatgataggccgaggagcaaaatgatatccctcagatccgatacaacttcaccaccgttgctgatttgcagactgtcgaaaaagacacgaccactgatgttattggcgttctgacggagattggggaggcatcccagattgtatcgaaaagcaccggcaaaccttacgagaagcgtgagcttacactggtcgataacacaggattctctgtccgcttgacaatttggggtgcaactgcacaaaatttcagtgtgacacccgagtctgttgttgccttcaagggagttaaggtttctgactatggcggaagaagtctgagtcttctgagttccggctcgatgactgttgaccctgacatcggggaggctcaccgactcagaggttggtatgatgcccaaggcaggtcggaaacctttacatcccatgtgtcaaatgcgaccaactccatgggcaaaagggatccctttaaaaccattgcgcaagttcgcgaggagcagcttggcatgtctgaaacttttgattacttctctctgaaagcaactgtgatcttcatcaagcaggataacgtctggtgctaccctgcctgcctttctgacaactgcaacaagaaggtaacggaacttgatccaggacagtggcggtgcgaaaaatgtgacaaaacctaccccaagccagagtaccgctacgtcctgcctattagtgtcggtgaccatactggccagctttggctcagctgttttgacgacactggaaggaaaattatgggcacatctgccgatgacctaatgcaacttcgcgaagacgattccaatgctttcggtgaagtcttccaaacagcgaattgccagacctggaacttcaggtgccgagccaagacagataactttggcgaccagcagcggtaagaatgatggaacgacaataattcaaataatgcgaacatcatgctaattgtgtcatccagggtgcgatatcaggtctcatcctgccagccgatcaattactcggaagaagcctctcgccttgccgatatcattgactcgtacagcattgagtaagtacaggcacagtggggaaatattattgtcctgctttgtactagctttactatttccatatacgctcggagctttttcatcaatgttcatgtgtacttttactagtatgctgctcaagctacgccatgatcatctcatttatggcttctcattttgacatttgttcgttctcccttatttagtattttaaaaacacctaaatagtaatttttcactaccatccccttccttatgagcaatccgcaatgtgcgctatcactccgtctggacaggactccaaaggttctacatgtaccgtactatatgtgaggcggtaagccaacaaaggcggaaatcaatggcattacacgattgctttttcttttttttttttttctttcgggttttctgctggaacaattcaggcagggaattcagtctcgtgctctttatcttttggttcattctaaaatactcatcatgggtaagcgaagccatcttgagccagctgagcagcgaccgaagaaaaagtccaagtctgagaagtctgagaagtccgagaagccctcaaaagcttctaaagataagcaggaaaatggcgatgagaagacagcagcttattctgatgcgtctgctctatccgatatccctcagtcagacattgacgcttttttgaccgagaacgtgattaaagtctctgatccctcctcacccgacgccacacaattccgcccaatcctttcgtttgatcacctacctaaatgtgacgctggtctgtacactcagttgaagtctttccccgcgccaacaccgattcaatccaccacctggccgcttctttttgccggccgtgatgtggtcggtatcgcagagactggaagtggcaagacacttggctttggcttgccgtgtctgaagaaattgattgactccaagtcaagcaagccttgtcaacccaaggcagtggttatctcgccaacacgagagcttgcaatgcagatttatgaccagcttgttaaattcggcggcactgagaagactcgggtgacatgcatttacggaggtgtgggtaaagatgaacagcgtcgggcccttcaaaaggccgccattgtggtcgccacccctggccgtcttaaggatctcctgaatgatggttcgattgatcttggaaaggtcacctatctcgtcttggatgaggcagatcgcatgcttgacaaaggatttgagcaggatatcaaggacatcgtcaagccgatgcccgtctccaagagacagactgttatgtttacggcaacatggcctcggtccgttcgagatctcgcggcaacctttatgaagaacccagtaactgtcaccattggcggagatccatctgcggatccccgagccaaccttaggatcaagcaagtcgtcgaggttgttgatggccgagataaggagagccgactcatgcagctgctcactaaatcccagcgtggtcatcagtcgcccgagaaagtcctggttttctgcctctacaagaaggaggctatgcgcattgagaatctcatcagaaacaagggattctctgtcgccggtattcacggtgatttgaaccaatcagatagattccgaaatcttgatgctttcaagaacggcaaagctaccattcttgtcgcaaccgatgtggcggcgcgtggccttgatatcccgaacgtgaagctagtgattaatgtcactttccctcttaccgttgaggactacgtgcaccggattggaagaactggacgtgctggggctgacggccttgccatcacaatgttcactgaaactgacaagggactgtccggcgggtatgttactcatatttctaatatccttgactggccaatgctaatgatgaatagattgatcaatgttctcaaggcagctaagcaagatgtgccagaagctctgttgaagtttggcacaacagtcaagaagaagcagcacgatgtgtacggcgccttttacaaggacgttgatatggacaagacagcgacaaagatcacatttgacgattaattgggctcattccgacttggtatttttgctggaggatttggaggacaaaatgtgccgaagccttgtcagttgacccatcaagtattccctttctatataggctctattatttttgtcggttaggcgttaagaacaaatcaacatggaatccgatcagatcagtactcacattacgagggcatagccaccacttaaggcgcatgctttgataattcccaattccaggccaaatccgcggcccaagaacaagctcgccagagcacacagaatgaagctagcaggtcgaatggcgacctcactcgtgtacaagctgcatccatttcgatggaagtaagatttgatgaaactgtaactccaaaaagttcgaaccgccatgttcacaatgttggccaggaccaatccatatgcacccaagctccctatctctaggaacatataggccgccaaggcataacaggcggaaaagacacccatccacgccgtttgcttccgtagctgttgcgaatttgccgcggatgatacgaacgcttcggtgatcccattaaatgccaaaaatggaatgtagtagcaatagacggagagcaggtctccgattttaggggaagcccattgacggcctcccaagatatgcaacaattgaggaaccatcagtgggcccaacgggaatatcaaggctgacaacaactggtacgcgcgtagaatatctacaagatgatctctggtagtgcggatatggatattgttcaacttcccatcctcatcggggctgagtagggcagagaataagttccggctgctctcctccagcggctggaagattatccgtgcaatgagaccgccatagttcgacgcaagagaatatatgccctgatcttccagtcctgaaagggctgcgagcgtcatagtgtcgccctgcgtgagcaaatgcttcactagagattggaaaaagacattcgcagcaattgacgttagctgtcgtgaaaatagtcccagaaagtagttggaggggtccctatatcaattgttaccatgtcattcttcgtggtatagcttgcactagatgaggccagtcttacctggttcgtatacgtgtcaataagaaagagaaccgagttccgttggtttctctgagcagggccagcgagtagccacaaatgagggccagcgagtagctgaggtgaccaagagcaaatggtagcacgccgaggtcaaagttgacttgagaagcatatatgaaggcaaaagatgtcaccgcacttctcagaaatgccgctggcatttcaacaacagcgcgtttttcataaagcatatgttgctgcaccactgagaaaaagggctcggtgctgagttccatgagagatgcagcgccgatcaagatcacactggggtagaagaaggcgatctttgatgcttcctctgacacgaagcgctggtaaagcatagtgaacataagactgcaaggaatcccaagggcgaggctcaagtaggacacgtttaccaccgcttgagatgccacagactgcgaatccgttgctacagcatctgcatcagaggaaagttttttgttgtcaggcgaagatggaacaggctgcctttggatagccatccgaatactttccctcgagaaatacaggatagaaacctggaagagctccagttgtgctgctattcctagcactaccggtgaaagggtgcgcaaaatcaattggttcgaggcaaaggtaaatatcctggacgctaattgaattaagatcaaaaagcttgtgcccgtggccgacgacgccagaatcttgcccatacgggcatcttcgggttttgccatgcccgtgattgaacctagttatgacgattcgtgcaataaggtgttctcacgtcaaataaatcaacaagaagactttaagccgacctcggggggtgtaggggtaaaggaaagagaggatgtggacaggtggggctctaatccagggcttgacgttttggcttaggcttttgaggaatggaagatatttgctagatgcaaatcaagaacttttttaagctgacgaaattttatatgaaaggaatacggagtaccatatagttaatctattgaatgccacttggaggtcacttgcttacgtgtagccctcaagttcccagctaggcatagttaagtatggctacaggctaattgtgaaactccttcttaaagaaccctctgtggcgtcttcggtacgtaagatttggtatgcaaaatttccatggcaaaaggaaagaggcactatgggtcaagatccgcaaagccctgtgtctcctccaagtggtcccccagggctgatccatgtcaacttccgtttgtcatcatatacaggaaacaagacttggaaagacctggtcactaggatatcaatgatcgtttgtagatcaatacgtctccaggtgttgccttgatcaagtaggctcttggacgctttagaacggaggcagatagaatgggtagccaccattcttggttttgaagacactaagaaggaagctgtatgttgtgaaaagaacagttgcccaaatcaagacagccagctgttgacccttgggatcttccatccggggaaccttcagtgcgagtgcgatcgtagcaaaggagagaacagcgtctgcgagcaaaatgttaacctaggaattcgacatggaaaggaggcccagtatcaatgagtctcacgattatcacttacagatggcagccacaatctgagtttccatcccaaactggttttggaacccaccggcaaagtagctaatgccaccatggccatcaccagcaacatatgggacctttcggatgtggttgaacatttgaccacttgtgaacagaagaatagcgataaggctgattgcagcccaaaggtttcggttctggataattgggagtatgtagggagaaagaactgcaatcgcagtcacaactgccatcagaattgtgatcgctgatacaatccgcatatagttgatgggtcgaactagctgaggcttggggccttcaggcaaatgacgtccaatccaagagtagacctggtcggctgatatcgggctattttggattgacatgttagtgagacaggagatgggcaagacccttggtagaaaaacataccctgtgaaatcaaaccgaaggggatttccttcaaccttggcgaagggaccgacggtaggagggaagacaaggagtacgggtgcagtttgaagcatgagctgcttaggttagtcgcatgccatacagctcagtctgagtaaaaatgccttaccttttggaaaatggctttgccattatcaaaatcaagtgttccaaagaccaccttgaggtcatcaggcttggtgcccttggtccagcttcgggcgatcaggtcccattcagattcgaagtcgcggcataggaggcagccaaagcgaggatccgtggcagtcaggataatcacagcatagtaatctcgaggtgtcgaggtgaggtcttcatatgatgcactgtccagttcaacaagccctgaacgagacagggattgatattttgtaaacttgtccggtgttgagctcgcagacaggacaccagacacgaccgaggaaaggagaaaaagggccgaccagagcttcattttagcatgacagtgtgctagacagcttgggaagggttatttagaaagtgcaattgattgaaaaaccatcaatcggttgcaattgaagttgtttgaacacgttgagtgataaagtccaggtgtccactatcaacgtaatcgcccggcatatcggcttacttaatatattcggggtcggcgtcggcgccaaaacacgggcgcgtcttcctttgcgacaattttatatcgtactttgacaagcattgaacataacaccacatatattacccttatatttcttttgctctggcctgtatcattttatttctaggcgttttcattctattttcttatatcgaagggctcctgtcctggacactgtcgtcatggcaatgacagaagaagcatcggcctcagatgtatgtggcttccctggattgatcctggtatagtcaaaaatgctgactctatcatgcagtttgaaatgtccataaggactatacttctagagaaggagtatgagaagaccctttcagtttccgctcgtcttctagatgaggagagggatcgtgtacgacgcatggagcttttgctctcgaaatttgagaatgaggctcttcggtcgcagttgaaggaagcaaatgggcatcttttgggattcacaagtgctgattcagaggcatgtgctcaacttcaggaggcttgccaagaaattgatcacctggagcttcgagcacaggcatcctcgattgagattaaccgactcaaggtaagtcttaacccagtctagaggccggaaacataatccgttatgttgacagcaataggaagaactatcggtccagaaaaataattcgaccagttataaaactgtccttgcagagaaacttcgtctctccagagaactttcaactttgcagtcagagcttgagcggttcagagcgcaaaatgcatcataccaagtcaccatttccgaaaaacatgagatggaacggcaaatgaactctctggagcttcaacttgataatgaaaaacatgcccatgaacgtgctcagctcaaggcgtcacagcagatgacagagatcacccagctttctgctcgagttggagagttacgggctgagctagcgggggaattacgagcaaaacagcagcaggaacaggacaaccaccaccagaacttggcatgggctaatgagcgggcgacgtttgaaggaaagattgattcgctcaaacaacaattgcggtccaccaaggacaagcttcaggaagcccaggttgaaattcagcagcgacgcaacgtaaaatcacacgcaggaaataactctgaatccagctctcgaaaaatcccccttcagcgccctggcccgagtgccggcgtgacgatcgtaacccctggtgctgttcgtgtgcaagagcaattgaaaaagcattcggctgtgcctggggacaagtcggcgttttccatcactccattcttgaaccgcacaggggcaccttcggattccccaatgagctcagttggagacgaagacgagattcttggaaacgacgacactcctcgtggaccacttggcaagcagggtacttttggcgaacagaagcgaattggttctgccctccggcgccagctatctccaacagaagaccgcattccaatcacaaaatccaccaaaccaagggcacgcgacggcgcaatgcctgtatcagcaccggataaagaggtcaaaaaaccaagccatcgcttagatcgcaggttgccacccaacgaaatcgatgaattacatgatcagtttgagcatgaacaagccaagccgaagaaacgcaaacttggtggtcagcgggatcggagcttgtttgaggaggaggatgaagaagagcctgagctcagcaagaaatttggacgaaaacttgcaacagggaatggtcgggctttaacgatggggagtaaaacacaaagtaccactggtctaccacgggcgcttgggctcggggcagcacccatagggttttctcccctgaagaaagaccgcagacgattttaatcagaagatccggcaattcattcttattggcacaggcttggtgtatttaatatgtacatgacatgtactccgtagacacgtacctagagaatgcccatgcttctaagattatgccgataagagccgacttgagtgttttgccggcagaaagtaaaaaaggtttcccaagctcccgattatctcccctgatattattcaattcgcattatgtttgctttacattcaactcgattttggcggaacgcctgccatcagcaggaaattggtcaagcaattggccaagcaagacatgcatcatccaaacgctggcaagcccggcagcaaaaggatcagttcaccagagaggcagctgtccaagggctgaaaagccgtgctgctttcaaattgctgcaggtgattcagaatcgacattactctatctctctggattagtctgacacactgttacctgcggttagattgatgagaaatatcgaatcttcaagggtgggcagacagttgttgacttggtatgctagtcgttcaacctaaactcggatcattgtttaattccgtcgctttagggttatgctccgggatcgtggtcacaggtgtgtcggctattccttatttgtctattgctgtcaaatgggccgtgattaactgccagaaaaggttgctgcaagccgcacccaaccgcatggccgagtcctcggtgtcgatatcatcccagcccaaccaccgaaaggagtatctacgattcaaggcaacttcctctcacccgaaattcaaacatatatccgagactttctccgcagtccagacagaggcaggccgcgccaacccagcttcctggacgattccagtatcagcccattggagccgaatgcagatacggaacgcactaccgaggccgagaagacggataagatgggcgagaaaatacttgaaagaacggtagatgtggttcttagcgatatgtccgcgccctggcatcagacctccggtttctggaaacgaagtctaagtgctccttataataggatgatgaacaccagcggcgtcagtttcagagatcatgctggaagtatggtatgtatgcctattactattgagtcgatatatgtgaaacccttctgactttacgcaggatctctgccacgcggctttgcgcttcagttcggatgttttgaaggcaggaggtcatttcgtctgcaaattctaccaaggcgccgaagacaaagaactggagcagcagctgaaggaattattcaaaaaagttcaccgccttaaacccgaatcatctcgcagtgtatgattgaccttatccaatttctacacccccaccgactaaagcaattgtcaggaatccaaggaggcctttttcgttggcctggagcgaaaagcgtgagactaaagctttttcggacttacgtgttgacagatcacagcatagccgaagtgccgaatcatgcagtctgtctaaaggatctcgatctcctcgttgtcagatgcctcgtcccagtcaatatcggctagtgctgcttccgccttctcatgaaccttcatattcgtcagtttgggatcaagtcgttttgtagtcatcgactgacctctcttagtccactcaattcttcgacatagccatgttcgttcaaggcttttcgcacaaagtcccaaccgtgctcgcggtatgcactgacaattttatctgagcatgcactgcagctcgaataacttttgccggtgacagacaagttctcgaaattagagagaaaccctcgtatttgatggggcacacttcctaaggggtgatcatcacgctcagtatttcgggcaatgggggctggtgcggcagcgcctcgggggtgctgaagtattgacacgaaaagctccaccagaagtgcagaggctataggagccactccagggcgggtcactgtacactgctggtcgagtgtttgatctttgatagactattccgcagtcagttctgtataaagcaggtcccttctttggataatcttacattagctggtactaccacatcgttgcagaaatagcacccaagctcagctggattttcatcctccatgataccatggcgcatcaccacaaaggaatcaaatcctagagctgcgttcatcacaattttcccagccgcctttcccatcactgtgggcagccatcgcgattctcgggtatccatgagaaggaagatagcatcatgttcatcaatcagtgtcttgagacgatcaaaatctgccctggtcgccgcttcgtccacaataggatggcctgccatgggcaccgagaacacataacctttagtatctactcccgggtaaatttgggttagggcttcggatgctcgaagtgctttttggacaccaccgttcaagcagtcttcgaaattgaatagtggctgccgaacagggttagaaaatgaaaccgtcccattgtcgacgaaagtgatcttcttcacgccccagccctatgtagtggatgattagaacaaattttcggcagggaagttgacgtccacataccagcagatttcgggagacgtagctgcctaatgtgccagcccctagcaatagacatttcgtgttcttgattttttcaagatcgagcgtcgggctgatccgccatttgataagtttgaggttgagatcaaccgactggtctgccaatcttcagtaataaaattagcatgcttgatcaagtcttcattcagtttggttatctccaaattaatgccatacctcttaggatccatgtactctgtaaggttgacaattctcccggctaatttcccagtcgagttgcgttcccaaccggtcacctttggcagtggtaacgacccttgactttgcagtgatctcggtgtctcagtctcttgttttgaacttgactccagctgaattactgtactgcgcccttgatcacgcctcgcgtgcacgtcgcgatagcgtatcaattgtaccctttcgatcccccatcgctgcttgatcagaacaagcaggtttcgtaacatccatcctggggcctgttcataatttgatgggtctgcgaaacagaaatagcggtcttcagtagcgacatttttgaaaaacccattttcatattcggaaagtgacgctatctgccagtttatatttgaagtgtcgccttgttgggcattcttcgtttcggaatcacctgaggatgcgttatcggaattctctctgacttttcgagccaaaaaaaaccctcgttgtcgaggatccaccatatatgaccatgtttccaccgcctccaccaaggcagtgctttcatgtggagataagtgtattcccttcaagttgtcaagactattatcctggtgtggctgggatacttggtctgttggttgcacggggacccattgaggatctgaatggattgctgggaaagcaaaccagtagtggaacttgtattttttgaggtctgcaaaagatacaatcacgaaactgcagagtaaggagggacaagaaagaatggttccatcatgaatggcatcccatatctggagttgattagtatctctctctaaggtatctggctaatgttgattcctaccatttgtccagcttgatagagcagtttggatctgtccatgtttcgatattcctcaacagtattgacatttttgatcatgccctctgctctgtaatagccagccgggaccctaggtcgctgttagaagggctttcagggatattttcttttatcttactcgctgctggttagggcgttcccatggatttgaatacgacacgacgcagcttcgggatcagacggacggatctcatatagtcccagaacaggccgggcggaatcatctagtttgtcatggttgatcttatgggaagccagtgaagtatagaagggtaattcgatgtcggaggcaaacggtgcgtactgcatcttggaggaacagggggagagaacgagaagaatagcttatcaactccagagtgatatagatttggaaggttggatgtagcagttagcaagggtggggggagggaggtgtaaaggtgtgtagtgaggtgaaagggtctgatgtcacgaggagcccgcggcgggggtgaaggtttatctatccacatttaccttcacacttgcttcatgtgaaaatgatcactacatatgtacccaaagccaagagctttatcccgaaaatataaataaaactaaggaggagtcctcaagttttagaggagcgaaattaaccgagacacaccgttaactcatagcgcgacatttaacaccacctcatatcaccacattctgaatgatatgagaggatgcatctcatttcgttattttttatcgtctatagagacctggccaccgtaagatgtgtcgccaactggatctatcaaaggggtccgtacttgcgaccccaaataataccttagttaatacaacgcactgatgagcaaaccaaatccccactacaaacctccaacgacgcggatgccattcccagctagggctccatctaacagctccgacgttcgcgccgtacataaagggatctcaggaagggacgacgccttcctggcaatggatcatcaattttaacgtcgcttaagcttcgcaatataaaaagatcggattttctaatatttcggattttactttttctttgttaatgttcaatctggtatgaaaccatatacgcatcttgatagtaagatagacaccagcaataagcaaataaagtagggttctgatttcgtgcagttactggtatactcaacgtgagtagccaccggcccaagccctatgtcccagctcagtggaatgcacgaggatgatatacatacatatctgcgccggtgagttgaactgcctaaaaagggacatccatggataggaggcttgattatatagtttctggtggtggatggctggttaaagtcagatatcgtagttgaatggcaaggagaagtacattaggcataggaaaccacctgtgagagaacacagctcattatcactaggccacaattaaaccataggccttttatatgtaatcatagaaagaggtgcgctgtatttatctgttctgtttcttttggcacatgggaataaggatctaaatatccgtgtgtaaaaagatcaaaagcagatagtgaaaatgcatcaataagaagatagactaagacatcatgaacgatgcaaccataggctaaccttacagacgccaagagcaatacttgtctatacagctacccaacactggagtatatgggcaacatcccgctatcaggccgataaggtcgcgtcgcgctttgctctgccccacttctttcttcttttcttctcttcttttagacagtacaatcattaaacaccctgaaaatgctcatcggcttatgtggaggtcagcagataattcttgcaaaccaaacccccacccgacacgggacgagctaacgaggatatacgtcaaaaggcatttgcgctggcaaacatgcgattgctgactacctgattcagcaagggtttcagcttcttgaactcgccgacacaccccaataccacactaccgacttagaggatgacctgcgactgcaagcgtcggagatccgaaaaaaagaccccaagtcaccaaagcttatatttcaagatgccgactctctactcgactttgcgacaaaaagatggcaagaacgctgggttactacagacattgcagatcctactaccctagatcgattcctcttgcgccccttcttcctcctcgtgagcgtggatgcgccaatcggcctccgatggaaacgatttgccgacaggttcgtgatgatacatgtgactgaagtccgagagctgattttctttttctttgattgaaaaaagatgttggagaagacaactggatccgcctgagcttgaaaagttcataatgtggaacgatcataatctttacgatcaggatactggacgtgtatacttgaccgacaaagctcaattgcgcctattcaattcctcgacaggcctcaaagagttacactcggctttacaaaccctcgacctggaaaacgaacaaaggttgaggccaaattgggaccagtatttcatgcagctggcctctcttgctgcccgaagaagcaactgcatgaaaagaagagtgggatgtgtgctcgttcgagagagtcgtgtcatcagcacaggatacaatgggacgccacggcatctccagaactgcaaccaaggcggatgtacgatacaggccagaactgaataactctaatggctctattgtccatttggctcactagaaatcattataggtccacggtgcaatcgcggggatggaggaggagtcggtctctcaacctgtctttgccttcacgccgaagaaaacgcgttattggaagcaggccgagagcggatccgagaggggacgatcctctattgtgatacgtaagtctacttcattcttctatgaactgtttcaaagacaaaatatcttactgtggatttcagatgcccttgcttgacatgcactgtgaagatagcccaagttggaatttcggaggtcgtttattctcaagggtacaacatggatagtgacgtaagtcaatgcttgttcattccaagggttctaattaatctaatttgaacatacagagtgcggctatcttacaagaagcaggcgtacggctacggcaattccacccggtagctaatcttctatgccctcatttctctttatgcataactgacttcataacagcctacaaatgggctcatcgttcttcaggcacccaagataccagtcacaactgaaacccaataacccacaatacgacagtaaaggcgcagggcatcccaaccttaagtgaagagaaaaatgcacctgcatcagtgaacatttccaccactcagggctatgtcaaagttattgtacaaagtaacttgtccaaataacattgcaattaaagggaaggggcaaatatcctagggctattagtagttaactattgtctcaagaaaatactatgactcacaggtacttataaagtatggaaggaacttagattatatagtaactttacgctttgaagaagtaccctaatgtacttattttctccgcattttgtccggcagaaaaaaaaaaggtatgactcagcgtgcggattttggcgggggtcttcaaggaacccctcgacggtttttatagctggatgcttttcggtgttggttcaacctcgatagtccaataccttacccgcttccagctgcgatcaccattgtacttttggcctaagttcctacagccatgcctaccgtccacttgctggactacgtggcggggaacatccgctccctggtcaatgcgattaaccaagtcggatatgatgtcgaatgggtcaaaaccccagaggatgtgaaaaatgccgatgttagtcaaatcccgaatcaattccagcaccattggctcatgaccatgccgttgctaacagcagaatcatagaaactgatactccccggtgttggccattttggccattgtctttcccaacttgacaaagggggatttttggagcccatccgacagcatatcgaatcggggaagcctttcatggggatctgtgttggcctgcaagcccttttccagggctcagaggaggacaacgacgttccagggcttggcgttattcctatgcgcattcaaaaattcaacgacacctcgaagagtgtaccacacattggatggaattctgcaatcaacacgggatcagatggcacaaaacacgaaagcttttatggtctgaggccgactagcaagtattattacgtccactcctatgcggccccctacaacccgggtgtattggaaagtgacggctggtctgtggctacagcaacatatggcgaggaagagttcatcggtgctatcagtcggggtaacatctttggcgcccaatttcacccggagaagagtggtgtggcggggctacgggccatacgcgcattcttgaatggcgatcaattccagtcgctctcacaggacctggtccttggcaaagaaaacgggctcactcgtcgtgttattgcttgccttgatgttcgcacaaacgactctggtgacttggttgtcaccaaaggtgaccaatatgatgtccgagagaagagtggaacagatgccggcggcagcgttcgcaatctcggtaagcctgttgacatggctaagaaatattacgaacaaggagcagatgaagtgacctttttgaacatcacctctttccgaaactgccccattgccgatacgcccatgcttgaaattctgcgacgaacatcagagactgtctttgtgcctttgaccattggtggaggaatcaaagataccgtcgacactgatggcacccatgtccctgctctggacgtggcaacgatgtatttcaagtctggagccgataaagtcagcattggctccgattctgtctttgccgctgaggactattacaacgccggtgaaaagttgagtggcaaaaccgcaatcgagacaatatccaaggcctatggaaagcaggctgtcgtggtgagtgtcgaccccaagcgggtatatgtggataagccagaagacacccatcaccatacaattaagaccgagttccccaactcaactgggcaaagctactgctggtaccagtgcaccgtcaaaggtggcagggaaactcgcgatatcgatgtgcggcaactcgtgcaggctgttgaggccatgggagctggtgaaattcttctgaattgcatcgataaagatggaagcaacagtggatttgatctagaattgatcagagatgtcaaagcttcgatcaagattccagtcatcgcttcaagcggggctggtgtacctgcgcactttgcagaggtcttcaacaaaaccaccaccgatgcagcattgggagcaggaatggtaagtttacattcttccaagtattattttctttcacaacagagtctctgaccatgtcccagttccaccgtggtgaatataccgtaactcaagtgaaagactaccttcaatctgagggattcctggtccgccaatttgaggctgagatttaaagactcggctattcaaaggtgtgatatcttcacatgggcatattttgcaaatttcacgtttttatacgagaatagagaatagatgtcatgggggtcaagtccatcaaccaagatactatacagttcaaatgtgaagcacagaaacaattcaatacacaagatgtttgagataatggattccaatagaacgtcgaagggcccggggccgatacagctattggcccgcccgggaagtcacatgatacactaaaggcggtctacagggcggtggagacagacacaaatcatctgacttttcctcacttgccacttcaccttctcctctccccgagtcaataaccgcggcgctccaaaagtcctatcctcaccacccacgcacctagcttctttcttgctaaatttcgattttttgacgataccctgtcggccttgatcaccgaactatattacttaacagctgcgacacctcggttttggtcgtttgacagcgaatttgctcattcctaacaggtctgtataactgggtttggtgtctgcaaggatcttcaaaaaggtccgacacaggtcagggtgctagggtggctctgcgaatcacttgaaggacggggcagaccatcaatctctcttgaatacaccttttttttaattcagcgccagtgttcgatcatcgtattcatcaattccttgatctccatttgtatgcagtgacctgaacactcaccattcagcattcaaaagattctcattcacacatccattgtctcagtggtctattgatccctgcttttttaaaaaatatctcgtgctttctctgtgatttgaacagataacgtctgttgcccgacctttctttgttgtgcctggtgatacaccagtttcacttcatctcacgagtttttttttcattcctctctttattatcccctattgctcactgtacacggcgacggtgcccctaaatctgggtcttaatacacctacggccatctttgttgcacccatccccctcccaaattgaatacaatgtcatcctctgttcatttcaaattcaaatcccagaaagaaccctcaagggtcaccttcgatggcactggtatttcggtctttgagctcaaaagagagattatcagccaaagtagattgggcgatgggagtgactttgagctgtcgatctacaatgaggacactagagagggtatgttactttgttccaatgtgtttcatttgctcctgactaacagcaagtcttctgagattcaatagaatacgacgatgacacgactataatccctcgatcgacttccgtgatcgcccgccgattgcctgcagcgcgccctggtaagggcggcgctgctcgttatgtttcaggcaagatgccagtcaatgctcgcagtgctcctcgcaacgaaccctcgatgagccgagtaacacccggatcagggcaatccgtcaacaacaacgtcctcgaactcaataatgcacaaacagaagaagagaagatcaacgctctgttcaacctgcaggctagccaatggcaagagcagcaacaagaaatggcaaagtaagcacacttcaaccggatgtttgattatgttggagatattaatataatttagcgcaacacccgtaccgtttggtcgtggcagagggaagcccgtcaatgtacccgaccaccctccgcctccagggtatctttgctaccgttgccgggaaaaaggtatgcacctctaatcaaatcaccccacctacagaacgctgacctttgtacgcaggtcactggatccaagcatgtcctacgaataacgaccccaagttcgacggcaaatatagagtcaaacgatcaaccggcataccacgttcacttcaaaccaaggtcgacaaaccagaatccctagcccccgatggctccaccgaagattcaaggaatacaggggtcatggtgaatgctgatggcgactttgttattgcaaagccagacaaggcagcctgggaattgtaccaagaaaaggcgaaggcatcggcggcggcagcagctgaggcggcagctgccgaggagagcaaagcattgcaagctcgaggtctggagtgcccaattgacaagaggatgtttctagagccaacaaagacaccatgttgccagaggacatattgcaatgattgtatttcaaatgccttgattgaaagtgacttcgtttgcccgggatgtgctacagagggggtcttacttgataacctcacccccgatgatgaagctgcatcaaaaattaaggaatatgaagccgacaaggctgaagccaagaaggagaaggacaaagtcgtcgcaggccctaatggtactcctatccccgacgtctccgaaactgagcccaaggagtcttccgccaccaaagagcagagcccactcaatcaaactcaagagactgcgtccacacaatccaggaaaagacccgctgaggacgagcctattagccggaatgaaaccgcgaactctgagccgggtaacgtgctaaagaaacagaaggcagatgatggtcattccgacgttccgacccaggctaatagcgtccaagacggtgcgcctggtgttgccccagtgaattttaataatcaggatatgcccttcaacagctttggaccaatgcaaggcatgcctatgatgcctttctcggctcctggattcggtaatgaagccatggggtttatgaaccctatggcgatggcgtctgccaatggcttccccggtggaatgggcccaggatggaatcccatgaacatgcctttcaatcctctccaagctggaatgttcgatcaaagcaatggtggcatgcccaacggatttcctaacatgttcaatggagacccttcaatgatgttccccatgccccagaatgggttccaaggcccaaactctggaatgaacaatttctcaaatcagcagcggacggctttcagcacaccttattcccgagaagaggattcaccgtatttccgtcaacctgtgaatccgcaacgtcatcaggctagaaaccgacgggttcggcctagtgattacagggagctttgaatagagaagtggtgatggcttgcatggatttgcattatgttttcctagtacacactgtgtatatgcatattatttacagcggcttttttttttttttcctacttattctttttttttctgtgtttctttttcatctcattctgaagaggtttctttttgaccttcagaacgtgtactactaccatggccgcaataagaataatccaattcatcatagtttcccacctttgtaataatcactttgactagggcttaggaattaatatcgagtatcatgtggctataatgccaccaatccgttcaattaatatctactgttgggcagtgtaactacttagttttaatagcaccctcttcatggacatgaaaacccggtagaaatcatgcataggacaagtaagccatgatatataacaataataattcaccagacgaagaaagatgaggaaatataaaatgatttcatattccaaatgcagagggaggtcaggtgactgggcccattcacaccgtctctacttccacaccgtccactccgtccaattccgtccgcttcccctgttcaacatcaatcagaccattcgattttcttctcaaaaaaacaccaaccgtcttcatcgtgtcttctctacttcctttaaatttcaaatttcaacctagttcgatatcttgacctacaccgctcatcaaatccctcccaaaacaattatctgaaagatcaaccatcatggcgaaatatatgaataaccacagtagtaattgcaatcaaatgcaacggttcctcgaccaagactcccagagcactgttctcgctacttgctacagtgtcgagccgtctacctccaaggtccacggcttccactactgcactaccctgggcgccggtaagtatctcgtaaccaaacatcatctatgtttctcgatctaatcttgagattaggggtacagtggtatccctgaggtcccttcggggactaaatcgtctcttacaagtcctccccacgacatcctcgattcccgcgcggatcgaacctggcctggaaacagttggccagagtacaagggggaggcaacgcataacatcccggaagagtgtgagagactcttctgtgacagactgtctgcgacattcctgggtgagaggaaaatcgtgggacaggagtcactggggatggatgcgttccgaaatgtccagtcaaatcaaatcgggctccagcatgctcgaatccagcaatggatagaagtgtgggattacaccagtgatgctatttaccgtggatttgtggctgaacacaataaggagcggaccttgttcgttttcttcgaggaccgtgcacttgaacacggcctcaagtcagggtatgtacgccccttgtgtttccttggatgcgtttccttggacaagtcaaggctttccccttttgcctagtcacagtcctccatgtgtgtttgattcacctgctgacctttcaccccccttagcttgatcgctctgttcgaactcgccgatatcgctacctttgggtgttcgcaaatagttgcctgtgtcagtcgctcccagcgcacagatgaaatggagcttgtgcgaagtttaggatggtgtggattcagcctcaccaccttggcgccttgggtctcacacagtgatcaaggaccctgccttagtaataaatggcttttcttggccgctgaagtctagcaatagcatcattgtgtgatgcgtttatttcgtttggattggagttatggattttgcttatgtcctgatgcttgagcttttgcacaaggcgactgtccttttattctgactatcgagtattgcttcttgcttccttattttgatttctttttcatgcgtattattgcatagttccatataactatacactattctaatgaaattgtcactttcccccgctttcacggggaaaaaaaagccgtgaccgatacgataagagataagttatgtccatatgacctcactcccaggcctgctttcaccattcacctaggtatacctccctttcaacattgggaagccttttaaggtctctcggagtggagcatcctatttaaacatctcccaggatgtctaaggagcgtgtcaaaagactccagttccccaagttcctccttccctcggtgttttcaaaacaaagtgcggggctttctccaacagaccgtataccccaaaacacaaagaccacgaagtatcttgacggtcatgtttcctatctgtgctgtgcaggctgtgcctcacatctttgctggacttcccaaattattagcaaaggatttacaggtcgccatggccgtgcctatcttgtgtccgcagagccagtagccactgctgtgtcggtcagcgcctcgtcttcgcctacagcctccctccccaatacggtattgcagcgtccagttcctcgccagcttgtcacaggggcacatacagtcagcgatatcacctgtacattctgtgacagtgtcctgggctggaagtatgttgcagccgaagaagaatcacagcggtacaaggttggcaagttcattctggaaaccaagaaaatcgccgcctcttcatgctgggaatcctcacctggtgtggatcagactatgaaagccgaccgccaatatggaatccagtctggcccagcaaatacggagtttgacagccaggacgaggatgagtgtgaggatctgttcgccggaatatggagccctggacttgctgcacgtcgaagaaaccgtcagatcaaacgtcgacctgcgatgtggggaatttcataagttgcaagaaatcctagggttggacctcgtgggatgaggtcattgcgtaatgtgatatgatacccttttcaacaacgttgtctcgcgtttttttctattgcatacgaatttattataatagtagccaacatgagcttgcgatctatgatttgtatttttttctctttttttttcccccggaagcctagcatttcgtacaggatttgattcattgaattcattagcactctggtaattcagatgagttcgatgatatatgaaagagaaactatgtgattaagcctcctatatccctacacagacggtgcgacttgacagggggcgtagataggtacgtatggtatagcaaggtagtagtgaagtaaacagtaaataccagagcacggcttaccctgcagcattttctctacacacttcctcgaaggcttgtatttctgttacctcctcttccacatgaataatattcctcgtggatctcaggctaatattttaaaacagaagctgatacctgtatctatgacataaagtagtagcaacaatgactcctccagctacgataacaagtccagctctagtcacaagtagaagagctatggcggcaacaataacttctccggcgatagcattactagcaggctgttaactaaggccaaatattcgtgattcctggagatcatgtgctagtatatatatcaccttgggtttcctgaacaagggtcgtaatcagagtcgttcttcgtcgtggtcaaagcaaccattagacacaagcgaatgtgctaggatatgtctttcggaaactggcatagcgaggcacaatatacgatttatctacgatacttcacggatcaagaagcatatctgcaagttttccgatatcgtcgatacgttttgttgggttaataatgaagcattatagataactagctattacggcagtagacagatagacagactatgtatagtcatttatcctatttagttcgctatacattcgatttgacgaaaacataatgaagtctgattggataaagaggatactgccagtacatttaatatctgttctggcaagatggccgagtggttaaggcgtgacgtttaggttataaacccgtcatgcgaaagcgcgtgggttcgaatcccactcttgtcatatcatttttttccccctgccgatctctgcctacgtacatggacaacaatcaatttgatcctacttaccaataacctggttaagcgtgactagcggcagattggctaggtagtagatgtgtgttactagcaaagaaaagaacagcctttgaaaacacccagcttattatgtttcttagccatctaaggttgtcaaattgacaaaacgcctttcttttctatgtccctttaagttagcataaagatcaattcctcgccatataagctttgaaatcaagggctttcggcgagaaaatgagataagaaaagaaaaccccgattcagccaaaggacacaagaccaccttgtttacgaggaagcatcgtcaacgcgagaccgcttggagtcattctccgcgggttcctcggctggtcttttcgaggcggtttcaggttgctgggttggctgctttgcaggcttacgtttgacaaaggcagacagatctgttgctcccttgctagctgcatcaagctgggctttctggtctgttgcggactgacccataatttgacccagaactccctttagcatagcctcgttggcttggtcgttctgctcaattgagacaggggttcggcgcagatcaacaagctgatttagttcattattaatgagttcgaacaatatgtggcaacggcagacacgagagaaaaacttacccgttgctccatctcagtgacgatctccttgacattggcgatctttcgctttgttgcagttgccttgtcctcatccccatctttctcggcctcaagtttcttctcctcctgggccattcggaccttgcagctcgtgatagcatactccatctgggtggcagcttccttcctcatctcttcatcaactttgggtttatcgttgttatcctcctccccaccttgttgagctgatgcgaattccagggcgagagagagcttgtaatggcattcagcaacagagggatcttctagaggatacagcgagttcctcaattcgagaacagttctcaagtcactaaccgcttctctgaatctctctgcttccaatgagatctcagcttgaagatcgtgtgtgtctgcgattctttccttgatatgctttgtgtccgtggacatcgtagtcgattttcctttgccctcatcattctcttctgcggcactcagcttcttgaggtacagaacacgggcaagatctaggacctcaaaggcattggcgaaatcgtcgtcttcttcatcgtcctcggcttggtcagcaggttcctcatcctcgtcctcggagtcgacaaaattctcgtctcctgtaaactgaaagaatggcttagatgatgtgggctctggttctctgcctgcgcgcttagtggaagacgacttttccgccatcgaattggtgatcgcgtcttggacaagggaatcactggtggatttcgacccagcggaggatatatttgttgaagatgctttgccggattgtggttgttgttcgccggctactttggagccaaggacatcacttttactcacagccacgttgtacaatgactttccgtaggcatagagtaaatcggcattctctggggataattcgccgttgagttcggcctgaagctcggtagcttgggagtacagctcagaggcagagtcgtagtctttagtcgcatctttggcagcagcctgtgcgatcaagtcatcgagttgggttcgtttctcttgctccgagactgtagattgaccgtcctgtggatcagtcatggtgaatgcgatttatgtgaagagtagtgaaagaagaaagaaacaaattgataagaagaaaagaatagcctttcgaagaagtaagagtaagattcaagtaggagagccgagtgatgtgaaaaaaagagtgggaggagattgaaagaagaagctttagctccggcgcgcgtgtcacgcgtcttcgatttaattgaattctggatctctgtctctctccctctctctttcaccccgtctcccctcttattatgcatatactctgaatcatttccaaagccttttgtactctcacttgactttcgctggagcttttgagtcaattccaactctataaggcttttgtcgcgtttcttgaagtcttgggacaatatggacgcctcaacaccgcgacatcctgatcgcttcagaatggcgacaggggatcctattccttcctcctcgcctgcatttggaacaccagcacgtccattcagaatacccaagggaaatgcgcctccccctaaaacttcgattttaccgatcttactccctccatcaaccctgcgcccaatagcctttcgaaccttcacccgcaaacataatctcacaatatcatcacccgcgcttcaactattagcagtgtttgtgggcaagaactgtggctcaggatggcgcgaggaaggcctagcagagcgagtcctggatgaggttgccaagatatggaaaagagccggcggaggcgtgattgtcgaggacgggaaaggagcgtccttaaagacaatactgcaaacccttgagagcagtatgagtgggggaagggttgttgcagggaaagcgacttcccaaaatggttccttgaagacatccaccctgggtgtagatgatgggcgggttgaaacagccgctgatacctcaaaacaaggaactgccgaggaagacgatacgcaattgtcacttcagccaagacattggctcaagatgattgatgcctttgatcttccgcgcttgacgtacaacgtcgacaagaaatacttcgaagccgtaaagtcaaagccatccttgtttccatcaccatcttacaaaactgcactattccgggatcgatacaatcttgtgtatcagcgattgctccggaatgaatcctttcagagctcattgagtgtcactgctattccttcactgcaacgttcatcgtccaatcttgcccaccgacaatcctataaattgacgccaatcgcaaatttgctgggaagaagtggaagctcgcatttactattaggattgcttgccatttcacctactggagacttatccctggtggacttgactggaagtgtagcattggacttgagtcatgcccgaatgatacctgaagatggcgcgtggtttgcgccaggcatgattgtgcttgtcgatggcatctacgaagaggaagagatggtaaaaggtgctgccttgggagggaatacaggaatcggaggtgcaatcggaggacagtttgtcggcatatcaatctgcggacctccctgtgagcgacgtgatatctcgttaggaacgagtaaccgccacggcagcggagagctgagttctagtggtggatttggatgggttgactttcttggattgggaagtgaacgtgcccaaggtgcacgaatgagaagaatccaggaaaaatgcctacgaggagaacaagacgcagcggaaacgaccaggctcaaaatcgctatcatgagtgaagtcaacctagacaacatgaagacactagacgccctgaagaaggtcttcagcacctacaatgatctatctcttcctgaacgcccacaagcctttgtcttgatcggcaattttgcgcagaaagctatcatcagtgggtgtggccgagccgggagtatcgaatacaaggaatatttcgactcattagcgctggtcttatccgatttcccagcgttgctacaacactcgacctttgtctttgtgccaggtgataatgatccttgggcatcggcattctctgctggtgcagcctcaacaataccacggcaacctatcccggagttgttcacctctcgagtcagacgtgcatttgcaacagcgaactcggagttgaataggtcacaaacccccgaacccgcaggtgaggcaatttgggcctcaaatccggcacgtctttcgtggtttgggccagtgcatgacatcgccatctttcgagatgatatctcgggaaggctgagacgcagcgctgtcaacaccactcttgacactgagttagatgttacaatgcatgagtcctctagcagtgctactggtgatgcggtccttgctgcaggtgagaacgaggtcgaagacatgggccagcaacaaggcaccaaggctgcgaccacctcgtctggggcgttaatggcccgcagactcgtcaagaccatcctagaccagggaacaatctccccatttccactaccattgcggcccgtcttatgggataatgcctcagccttgcagttgtacccgctgccaaccgcactggtacttgcagacccggaagctgcaccgttttgcatgacttatgaaggctgtcatgtcatgaaccccgggcgcttgctaccggaaggtggtactcccatggctagatgggtcgagtacgatgtgttacgcaaccgagggaagatcagggaagagcgctgttaacctagttgtaggaacgatctaattgaatttcacgcatcatgaaaggaaatacatttagatgctatgtcatatcgagacctaggaatacatcgtgaagagaaccttgtagttgctcttatattaagacggaacaggcttaagaaagctttgagttacacaaaagccatggggagaatggagatggaaatcatggatggatcaccacaatgcctagtcaatggtgatgacatcggtatttcccctagcctgtggagcagcaggtgtcgagcccttgatttggaattgtttcggggtttgctcgggtttgacttccacttctctgtcgagttggagatggggagcattaagacacccgtgcagctcgagaatgaggttctcgaccttgttgatactcgctaccgctccatctccgaggccgttccaaccatcgcctttcgattggtacagtttctcttgtataaaagctgcgacctggccgcggccagactggtccattccattggcatcccttaacatccagaccaaacggtcctggtgcatcacggcactcaagtggaaacgagatctcagtcggggatagtgaatcaggtatacagtcggttttcgcgcgatgatttgcacaattgacagatccgtctgattcgactgaggggtgatctgatctaatgaccgcagcaaaggaagcgtggtagctaagagctggagggttgattcaacaccggcttcagtgaaccgctggttcaaagccacagtgaggggctcttgaattcggcgatgagggctagagccttcgaatttgatgcccaatttcagttggaaaagaggcttagtcttcgaaatagcatctgcaacgtcgacgtagtcagacaaagaaggcccctcggcgctgatatcaaagaaagcagaaaatttgttctcgtgcccataggcaaaattaattcgtgacaaggacaaagaccgaggctccattcccttccgtatgagggactggaggatagagaggacacactcgagtcgctgcaagagttcaaacagacaaacgacaacagaatgaccggctggcacaagcaaacgaagcgcgaagccagcacccttatcttcaatgatcaacgaagaatccatctttgagacgagtgggatcaatgatttgatacgggttttcaaagtgccgtgagccatcattatgacagagcggctctggctgtcaactccatggaaaaccagtcgaaccatttctttgaattgcgactgcttctttaccccgaagggcaagcttacccggaaagcaggtggaagtgcagacgagctgtagttgaacaaaagatccgggactgtgagatcctttttcagctgcaattctttcaacgaaggccagaaatgcatggctggcaagtctgccagataacgcgcattggcatggatcgcgaggattccagtgagtccatggaccagctcggcacacgttgtgtagtcgggtcgtctctgcggaggaacgagggtttcactgatcacgtgggcctgcggaacactcatgccaatattgtaaaagggtcccgttttcgctgcctcgattggtcgaagttgaacaagccaccagcggtcaccatccatgctactggttgctgcagcgacccaatgccggttccaaagccggtgggtgaagaaagcggtccgcattacaccaggagggaacagcttgcgaggatcaagcccaagaaccctttggttcacaagttcgagaccgagtgcctttgtgccggagcaaatctcatccaccgcagtgatacatcgcactcgggcgacacgagataatatctcttctattgatgatttgtagagcgctcgatcactatcgagacgctccaacacatgcggtgtcccacacaaggtaatagaccccgacataggttcgatagaaacccgaagagaacgtgaggctgtgagttgcatatctaggcgacaatctccaggttctgttggtgataattgagcctgtagtgatagtgtgtgattcgagaaaagaagatgctttttgagggtggtgaatgtggtagaaagaagatgtgacgtgtgtaatgcgataacgctcctcagaataagctccatagacaggtcacctgagttgaacctgatggcatcgctgctgacctgctggccatcacgcatccatcggaagccgagatgagatatcccaggtttcgggtcgctagaactgccaccgcggtgaccactcttgattcctatttcgagccagctcttcggccccgatctctgaggccaatattgaacgacgagtgttcggtgcaatagctcaatacgcaacgcatctgcccaaaggccccgagaaaggtccacggcttgcttgaagaggatgttgattttattcgtaagaacgagaccgtggagaaattggaagcatcccatcaaaccatcatcgcgaagaagatcattaatcttaccatcaagttcattgaatattcgaccttttgggataggtgatgatggcgagaaaaggaagcgaatgtccacgaagaaaaactgtgattccttcgactcttccgcgactgagagatcaagttcgaattcaccagaaattgtgaatgttacccggccatcatggacccggtactttcgcagtggcggcggcactgaatcgtgtaaagccaaccgcacactgatgattcggttgagtttcagtagctttttgagtgttgctcgtgcagttagtggggtgggaggtttgtaaccgagctggtaaggatgttagattattataggttaggaacattgaagaaactcacatctggcaaagaggctactcgtccctttgataatacctccaccgctgtttttaaatccgggttggcaacttgtgctcgaacaagatcgcgtttcacttcaccgacatactgaagagctgcgtcgtatgattggtgccgtgtgcgaatgaacccttggatatcaatgagtctgctgacatctgcagcttgtcgactccattgcgagaggactaggagtttgatgaactcggctctctttgcatgagcgaaatccaagagtcgcgacttcttatgcacattctccgatgactggttaccggctggttttccattggttggcatcgaaccacccgaggctggcacttgtatcgtagccaattctgtaatcaactccgagagctcattccaacattcctgtactgagcgattgaccaatgtcccgaacggaaagaacccttgtgtgatatgtggcagcttaaatggcgatgtcggcacgatttccgctgccttatctgggggcgttcttgtatgttgattcgaagcactcgatgcgccattggcataaactgatccattcatgccggagagatgactggatttatcggcattatcaaaggcagtaggcgcatcatttctggcctcattggggcctgggcgccgaacagatccctcgatgttgacattgtccatgatgacaccgggcatatttggaagtacagcttagctgttttgtgattgtccgtcgaagctttcccctccttggccctctgcacggcgcagaacaagcgacgcaacacaggcactgctccgggctcgatctagtcggcgctggggtaggaagggaagccgaaatcgaagataaggccacaggtagatccttaatatgatgccatgcgtttcacggaccgtgtaagaagaaggccacgctcataatcggaggagcttggcgcacggcttaggaatcgaatgggccttaagacggtcagtcgaggctctggcgatgatggcaacggatcgggatcggaatcagtgcgaaatgctccggatcgcacaggtttcgacttcgatatatctagcaactagctgtgacgagaggtgcgatcggggatctagatatttcaaggataatagcagggttgtcgcaatcgaggaacgcagcaaaacaatctggtgggctgcaggaaacgaaaggcagaataactgccgaagtaaaatgaattcaaatgttcatagatattctggaaaagcagcacctgggaataaagtgtgcccagaagaggactggtcaacaatatctcaagcccaagatgatttgatttgatgaaagcgcgatgcgctgcatgcatttaccataccgcctttgatttggtgccttggtgcctggtattgtgatgtatcaatttgcagagtgtggtaatatacgatgtattattggaagtaccgctacaatcactaaaatacaacttaacactggtcctgaagttcctagtgacttcctgtaccataccttgtgaaataccccaaccccagaaagtcaacattggccgtatgacctcacctctttgataccgtcacccaactacctaccccctaggcatcgttaacccaagtcactttgaactgaattttattacctcaaaatactatatgccttctcatttgatttgtttctggccatgaatttggctttcccttgccagccatgagtatacaggagaatgtcgagtctctccctcaatatcttggtgatgacacccggccgactagcaagagggagcttgctggctggtattgctatggctgggctgccgaggtctttgtagtctgtgccatgggtacgtgtgattctactttcatagatctgttttttgcatcttcatcctagactttttatctgatctgtgaaaggttcatttcttccgataacgctggagcagatggctcgggatcggggcgttctgctgtccgacaaaacgacaccatgcagcgcaacctggagaccctcgctgccatcaccaggctcggatgcaccggtgtatcttccccaggtgtcagatggcggccagtgcatcatttacttcctcggcgctgaaatcaacacggcaagctttgccctgtatactttttcattgagcgtcttagttcaggcagtcctgataatttcaatgtcaggagccgctgaccatggaacctatcgcaagaaactcttgattgtttttgctctcatcggctcaattgcgaccatgttgtttttggttgtggtccccaaagtttacctcctaggtggactgcttgcaatcatttcaaatacttgctttggtgcgtcttttgtccttttgaattcgtttctacctgttctggtccgccaccatccatcgcttaaggaaagtgaagaggcgacaccgtcaggcggtaatgtgacaagccccaggggcaaccctttattttcttcgaccggagatatggaccgaacaaacatggatgactctacgccgctactcgggcctaacagagaagccacaaagacgtctgcttccactatcacttccctagagcttagactctccaccagaatctcgtccaatggcatcggcataggctatattggtgcagtgattttacaggtgttttctatcttagttgttgtggtcgtgcgttcaccaacattctcattacgccttgtgctcttcttgattgggctatggtggtttgtttttaccatcccggcagccttgtggctgcgcactcggccaggcccacctttgttgggcagtgacggcaaaccgctccattcgtggatctcatacatggcatacgcctggaaatctcttggaaaaaccatcgcgcgggcgcggcagctgaaagatatcgtgatcttccttgctgcctggttccttctcagtgatggaattgccactgtcagtggcactgccgtactatttgcgaaaacccaactcaacatgaagcctgccgccctgggactgatcaatgtgatcgtcatgcttgcaggagtattcggtgcattcacctggagctacatatcgaatttcttcaatctcagagcctcacaaacaattattgcgtgtattatcttgtttgagctcattccactgtatggtcttcttggattcatcccggctgtgcaacgcgtggggcttggtctccaccagccttgggaaatgtatcctttgggggccgtttatggccttgttatgggtggactgtcatcatactgtcgaagcttcttcgggcaactcatcccccctggttacgaagcggctttctacgcgctttatgcaatcaccgacaaagggtctagcatttttggaccagctattgttggcgctattacggatcgctacggtgagattcgaccggcgtttgggttcttggcgattttgattattgtgccactaccacttatgcttttggtggatgtcgaccgcggtcaacgagatgcattggcgttgggagccgaattggatggcataccgcaaagatctgagtatgggaccatatctgacgatcaaaccacgggggatccgattgaagagtgaagatcaatgtatgtgtgactgtgaagtgagaagtaggggaaattgcattaagggtctctattcgtagggttttcgtttacaactaaaagaaagaagggtattcccatagatttcgtgatgttatagtaggatatatacaatagaggccacttgtcaacaatgcgtcaaatatcaagggcatgtctccgttaccattattgttatagttgtacctgtaccttattcaagtatcttgtaccttatactcgaatttcccataaattgacctggcaacggaggtaccaggtacctgaaggaaggtccgcccttgcaaccctgcatagcccagtcacaaagctccacctttagtgaacacactgtcctcaagttcccactccccaataaaaccttccctctctggatcttttaagcttgtctctactttcttctagctttcaaccttgagcattttggttgtttgattcaagatattaattatgcggtctttcgcccctctggtcctgagccttctcggagctactgcggcagtccacgctgctgagcctgaagttgccgacactgacgccaatgtcgtcaccttgacaaccgaaacctttgatgaattcgtcaaggagcaccctttggtgcttgctgagttctatgcgccttggtgcggtcactgcaaggcccttgcaccccattatgaggaggctgccacagagctgaaggccaaggatatccccgtgatcaaggtggattgcaccgtggaagaggagctctgccgaacctacgaagttgatggctaccctactctgaaggtattccgtggccccgatgcacacaagccctacgctggtgcccgcaagtccgacgcgtaagtcattctaggtttcgggttcttgtgctctggaaattaacgcgtttcctcgatagaatcatttcatacatgaccaagcagtctatgcccgccgtctcgaacgtgaacgaggagaacctagaggaattcaaggccttggacaagattgttattattggatacgtggcttctgacgacagcgcctccaacaagagcttcacttcgttcgctgaatcccagcgtgacaacttcctcttcgctgcctccaacgatgctgctctcgctaaggccgagggcgccaagcagccctcgattgttctctacaaggaattcgatgagaaggtggccgtttacgacggaaagctggaggaagaggccatccttgaatgggtcaagaccgctagtactcctcttgttggcgagcttggtcccgagacttactcaaagtacatggcggtatgtctaacttcttctgtcctcgtatttgagcaagaaaagaaactgactttctacaacgattaggccggtattcccctggcttacatctttgccgagactcccgaggagcgcgagcagctcgctgctgatttccgtcccatcgctgagaaccaccgtggagctatcaacattgttacccttgatgctaagctcttcggcgctcacgccggcaaccttaaccttgagcccgagaagttccctgctttcgctatccaggacactactaagaacgccaagtacccttacgatcagactaagaaggttgatgccaaggatatcggcaagttcatcaaggatgtccttgagggcaaggttgagcctagcctcaagtccgagcccattcccgagactcaggagggatctgttactgttgttgttggccgcaactaccaggaggttgtcgttgataacgaaaaggatgtgctggtcgagttctacgctccctggtgcggacactgcaagtcgtaagtttttcacacctcatctaccatttgtcgcatgtctaactcatcatcacagtcttgctcccaagtacgaagagcttgctgcgttgtatgccgatgtccccgagttgaatgagaaggtcactgtcgccaaagtcgacgccactgccaacgatgtgccagattccatcactggcttccccaccatcaagctctaccccgctggtgctaaggactcacctattgagtactctggttcccgtaccgtggaggacctagtcgccttcatcaaggagaacggcaagtatcaggcggacggcctggccgatggctccaagaagcccgaggagcgtgccgaggtcacttcggcccccaaggccaccgagtctcccgcatccgatgagaaggatattcatgacgagctttaagcgcttactcgctttttgaatgtgtaacttgatatgttgtattctatgcctgaactcggacttatattcgatgccatttattccccgtagactgttgtggcacaatccagactcttgtagtggctggtatagattgaatcagtaaatagtttctccgtataattctataaattttataaatactatatttgatcatctcccagccttgcagatcaatcgcgtcgcgtgaaacgcgtcgatttcttatcgccccggattgagctcccgacaacttccaaagtcctggggttatttctccaatcttcatatttgcccatcatggtcagccctgtcatgaaacgaaaatcggagcatctctccgcccctgactcgaaaaaacccaaaggtggaagcatcactgcattctttggagctccaaagccgaaacccgcgagcgcaacttcagccccacggccatgcagctttgataaggcaaaatgggttgcttccctgacgccagaacaaagggaactattgcagttggaaattgataccttggatgagagctggctcgctcacttgaaggatgaagtggtcagcactgaattcttgaacctgaagcggttcctgaagaaggagaaagattccaatattaaggtctttccaccagaggaggatgtctattcttggtaaattggatcactctattcaggccaaatgtgtgtgctgatcatactgtaggtcccgacacacccccctgaacaaggtcaaggtggtcattattggccaggatccgtatcacaatcacaaccaagctcatgggctatgtttctccgtccgtgcccctgtacgagccccgccatcattgctcaatatctacaaaggtatcaagatcgactatcctgacttcgaatcaccgcccgataagggagggcttctcataccttgggctgagcgtggcgtcctgatgctcaacacttgtcttacggttcgtgcccaccaggccaacagtcattccaacaagggttgggagaaattcacacagaaagttatcgatctcgttgctcgggtacgaaccaccggcgtcgtcttccttgcttggggccggcctgctggaaacagagtagcgaaaatcaacaaagagaagcactgcatcctacaatccgtgcatcccagtcctctgagtgcgcataatggctttgtgagtagatcctcatctaaggacatccttggaaaccatatttgctgacaggatgatatatagttcaaaaatggacacttcaagaagtgcaatgattggcttgctttgcggtacggagaagacgaaatcattgactggagcttagtgccatccgaaaagcctctgttgcctccttgcgtttctgacaaggaagattcgaccgctttggtcaaccatttgccacaacctgtcaagcctgaggatgtcaaagcccagcctgacaatgatgatgagtttgatgacgatgacgctattgaagccctaatgtcggccgaagcagaagcttcttcgaacacaatttagacttcttgaactgcatgcatgcctgtcaccttgctggcttagaaaagtcctgcgttggctgtgtttgtttccatgttcttttacccgaggaatatttcaggagttaagaagttgggccatttctatatgtatagtagctaattttcatttcaatctattgaatgtctgtttcatcgatgtctttaattaagctcatttcaattaagctcattggttgacaacgatcttgcgagctccttatcgataagcctatctcgatctccgattcttcttctgctgagaatctcccctataagtacacctgtgatgtaaatggtttcctagatggaactcacgtggcttccggatatccctcaatcgcggagtcgcactcgagctttgcgagcttgtcccacgtgccaacgatcaaaggtacgtacacgatgggaatattgaacccaactttccatctaacctcgcaatagaaacgctgccggcatttgattcccaaatgggaacccttcaatgacccgagatcaccgccacaatcgcacgatgaccttgggaggcctattcacagaaatgactcgaatcgcgaacagcttcctgcatccgcgcacatagaccgagcgcaaacaacgtccgacagtctagctccgttatcggttcctgccaccgagcgatttgtgggagatctcaatccagaatccctgattcgcgagcgattagatgagccgactgggagccctctccgggatcgtatcgggctttggatcaactccccagctgcgcagaaagcagagcctcggggcatacagagaggacaagccacagccggagaatatgcagccaatatcccggcacaaagcgcaatcgatggccaagccattgcatcgttacttcaccaaaggtttgcggcggggatacaagcatgcgaacaactacctctcgcgacgcgccagtctttgtccgctatctatttctccaaggttaatcacatcgtgccaatagtcgaccaggaatctttccaagcccaagaagaaggctcggcgtcggtgttccttgaaaaagccatatgcctcgccgcagcaaagacccgcgcggctaatccccacttacgccttgtgccagacggcccaatcctatcgtcacgccaattctgttctgagatatataaggagctggttgtagctatggacgcagagctagaaccggatcggttgacacggatccgcgttcttgcactgatgtccttgcactgtgagggtcttgaaggggccgaggcggcatctctacatctctgccaagctatccatcaggcccagacggtaggattgcatctcggccggccgaatcaaacctccacggattccctcactaaactcttctggtgtctatggacattggacaaggtgcatgcaagtatcggtgggcggccggttcttctagctgaccgcgatatcggggtcgtaaagcccgatgtcagcgctcagacgtcgcgaggggctttcgaggtgtggcttgccgtgtcggatttgctcgcaactgtcatatcgttctaccgaccctctgcagaagccacaagcgggtgggaagagggattccctgcgtttgaggatatcgtaggggaggatacccaagatgacctggattttgctactctgggtatgtctatcatggaggtctctgctgtgctatcgtttgagctaaccgcgagtaggcttcttggagctttactatcattctgtggctattttatcctgtcggtataaacccaccgagaacatcgatagcaccagactgtcgtctgtcagacaaggactagcagctgttcgcattcactccatcgtcgcctcggagtgtgcagatgacctaccaccccttccaatcgtgccgtactctgtcaccttgtctatgggtgttgcatatcgacaactccgctcgagcagacttatcacgcacctcgaccgagcgaaagctagtcttgaagcgtgccgctccgttctagaaactcttagtccatattggtattccgccgaggcgatggcccggctgggccaaaaagccctgcaccagattcaaggcaagccacaatcctctcggacgaaccctatcggtccacagcatgtggcagaggcctcgcacaaagaagtcagcacccacggcccggtatcagaggggccagggacaattaatccggcacctcaaggcaacaattccccccgagctaagaggcaacgcaataacgaccatggaaccactgctgtgtctccgccggaattcgcgatggacgtcctccaacctccggtgggcggtctggatacatctatacaagacggatttgcagacattgacacactgttcggagagttcttagatatctctctaccgacccatttctgggatcctatttttatggaaaatcaagggcaaacgaatgatccgcagtcataatcatcatcattagaagtatatactatgtataaaaaaaatgaaagaaactatacatgatgcagcgtgaattttagtgccaagccattcgcctgtgcaaccttccatacgagaagccgttcatcaacagactgtctccaagccgaagttgcctttcggatatggtcttcattctgaaagcttcatagactcatgctcggacataccgttccccgccagatgggcgaaatcaacagtcttagtttcagcatcgaagcccatcatgttcacgttatcaacctcaaaatcaaagcccttctcatgggtcgggagaccgtttggttgtgcgttgtcatcggcaaagaaatcggtgttgcccggatcgtcaaagttaataagtgcatcgaagtcattctgggtgacttcggcatcatttgccagatccatgagttcggtgagactcatttcagagggcatagcaaaggcattggggtccttgttgtggttggcattcagattgaggttattggtgctgccgttctcgcttccgtcggagtgcggtggtgtcgaagcaaaaatgtctccggtggaccgtccgcccgcggaaggaccggagagtttggggtatgtgagatccgggatcttctgagcgagggaatccggcgggggcgtgagggtgtgcaggcgggaggggatggtggtgttggtggtcgtagagagattgaagggatctgaggatgtggtaggttgttcgcggggatttgatgaggctggagaaggctggatgtcttggggagagatagtaagctgaatgcctgctttgcgaattgcggcttcgaggaaggaggtggcgaagtcggcagaggcgtagatttcgcgcaggcgttggaggattcgcatgcattgatagaagcgctggaggcttgtcatgcggatgcttgggtcggtggacttgatgtcgaggagatgtatgatgacggctggtagaaggactgtgacaccggtggtggggtagtaccgggtcaggtcgaggcaatgcaagtcctgggcgatggcagtgatctcgactgcggcgaatcgcaccttctttcgggacatgtcttggagttcggcgtctgcggatgggtagggaacggcggggaggacttgcgggcggtgcagagcgctagatgtggtgagatagaccatcttcaacaaagcgcgatgggagtgaagcacttcgtctgcttcggatagtttcgatccgttggatggtgcatattgggtttcgacggggaggttggccagccagtcctccaattcctggtcacaacttcgtacctcgaaggtctccgcggtggatttcttcgggacgagcatcatggtggtctccatggtgccaccaaacttatggctgaggaccgagtactgggcagataatacatggctgacgcagaggcagagcttcgctttctcgatgaacatcaaggcgagctcgcgctggtggctgacattctggagaatctccgagttgccaacaatcgccacgatctcgggggagaaagggtggaattcgaagtcatcgagactcagcataggcacatcacaatcgtcatccttgacacgcataggccgtcgcatgcctagggcaatcagtcggtcacgggtgtaggtgctccaccatatccgcttccacatgcgttgccgacggatatccatccgcgagttgccgggatcccggtgaaggccgattgtgtgggctaaagatagactcacccccatccaatgccaagtgtccttttggtcgtcgggagtttcgtaccagtaggtcatgagcagaagcgattgaacaagcgagatgcggtccacctcgtagtcgaaatcgtataggagacgagcacgctggaagaagactttccgggcgaccttgcgagtctggtagccggcggcctgcagatgcttcatatcaatgaaggccacaccggcaaacatgacagcctggaagagaagcagactgatgcggtggattccatcattctggacgatattctgcaggaactcctccagatcgagcaagggcatatatgtgtggacatagtgaatatagcttttcaagagttcgttccgtagtgtcacatcggggatagtcaaggcacccttgacggccaagtagtcaatatcctctttctgaagtcgtgcgggaagtcctcggatgtaatccgggaggaaaccactcccgggtctcgtattgccgaaattggggtctaatagttgttggatttgcgaggtcacattggctaatggcattgaagcgggaacggctgggttcggagccatgcggcgtcgatagtggtcgtcggaaccgatgcgttgagcctgattttgatctgttgtttttttttggtcagccaaatggatttcttcggggtttcgagggaattgacgaacatagtagatgaggcatatgttgaccgtggtcaagatccacagaggcttgcgagggagatgtcggtaccaaatcggccaatcctgaaagatcactaaggcgggagaaaggattctcctccgagccctccggagactccgaaaggttctctatctcaatgcgagacttcctaaatcacatgtcagtgaagtttataggtaattaatttcaattgcacgaactttctgcgtttactctcggtgaccacgcactcgacctggtctaaccggcaattcgtgcatggagagccattctccaccacatcacagcgcactttacgggcacggcaacaacagcaagccttcgaggcgcgtctcttcacgggacggttatgagcggagagaccggccgtggaggcctttcgtttcccagattcagtatcggtcatggtgtgttattgtgttcgggggcgactagggaacattcgagttatatagagacaccgggcatgtgatagagagccgaaaagggaatgtcacgatgtgtgaatatgtgaaataggaaagaaataggaaaataaaaaaaaagaaagaaaaggaaaagcaagtcgaaggccgaaatggagggaatccttttttatttaattgcatcccgcaaggtttaagtatgccccaggttcccacatttttccttaccatggttgaacccgcaaacagccaaggtttgaggggagtcgatccgctaggaatagattacggcttactgttccccccaggtattacagaaaattacccagttgggtaatatgccactacaaagtcagggctaagacccgtcagactggggtaccttcgacacctctctcggcccggtcacgttacgtctgctttggacatgtgaaagtcgatctatgatatcattctctgcatatgccaatatatgagatattttgaattgcaatattcaatgtttcttttgattgctctttttctttcccatgccaagtgggccctctatcctccgaaaaacaccgggctaaaacattaataaataaaacgccgtgaagatcctaaattgcgggtcgaagtcgaaaaaaggggaattttccagtcttttctcacattccccaactgtcccaaccgccaagactggagactgagttctccagtctccgaccagcggagccgatgtggaggcattttggcccgtttgagtcgacgtctggaccgatgagtaatgtgatcagcactcttccaaggttggtttctgcttattgaacggtgtcgatatatgttgtatatacatccatcttctggactatacaacgacaatcctactccgtacactccgactatatagatcatggcagggttgaaactattgattccttacataccgactcgacctacgtaatagcacggtcatcacggctccgcacctggacagctctgttgttattattaatcttcgaggccgggccttccacagtggaacgccattatcgttccaatgctatgagacaattaaattgtcctttgtaccacatggacaatctgttctacttgtactctctgtgctacggcttacattaaatagtgatacactcagacttgactcaccaatattatatcgtgctacccacaatccacaagccccggaataatgacaacaaccggaatcgtggagtacccctgaacgccaaaatgaatttatatcccgcaccgtgttcccacccggcctgccgagttagccctcacgtggaccaaaagtgccgatttccggaagaacgtccacattctcaaagcacatcttcatgaacgggttaacggggtacccttcattacttttacttttaggactgtccattccgttttgaaatatccagagcgcaatgacgccatactccgctaaaagcctcagacctggaattcaactgaaagtccaatggagaattctgtctctcacgaggtcgaaagcggatccagtgggacgccaatcactacgatagcaaaggtcaatgctggcttcttttttactttctttttcttttctgttctgtatctctttggttttattaccggatcctcccttggaaattccatctgcttcttcccggcatattccgtcatccccagaccaaatccaatgaatcaccagatcctggggtagagtaccatgccttttcagatcgtgacctagtgcctctttagaattctttggatcggaaaccatcttgaaagtcaaaaccttatgctccgatacattgccgactctgccatccgaatcggaactggtcggttccagccttggaaggtgaaatgttactcaattgtcaattcttcagtgtctgcttccaaaccctgtagatcgtgataacagatcaaaggtacggagtaggtacataaagtggcctgcataattatgcttcttaccgcctttttctgccgtctatgtatctatgtataaaacttatccagggagaagatatgtaaaaaaaaaaaaaacattaaaccaactgattcatgtcgttctcaatgacaaaggccgcaaatgtaatcatgtggtccagcgcttaaagcaggcgtacggactgaacatggcttgcgtctaggctcggccaatgccgacttgtgatattcagtcccggaaaagcggaatgaaaactcttatattacatatccctgcacatgaaacttgcgcaaatgcaactaatcgagtcatagctgcaggactgcagagcacacaagtccatacctctcagacatgtcgtcaataaatattgacagtttgaacagctcagcagaatcgaggataatatatatcgactcccaaattgccaagcactcgataacaccagtagccagcagaccaagacggcagaccggcataattgcaccccacatttcgccagtccggggggaaggccgagtctcagccacagaccaggtcggcttagatcatatcctctttcatcccgcacatgggggaagtcgggggtcatggcgtacatgcccctccaaatgcgggggaaataggaaactccaatgagcgtgaatcattggctgtgatcgctggccacagggtatgataagtgaatatttccgcatgactaggggacgcgggtcctcactcgggccaaagtgccccatacccagcgaatttaattaagtcaccccgcgagaaatcgccgtttccggggaaaaattgaaataattattctttttttcttttcatttactttttggtacggtggcaagaattccatggttctagcgtgtatataccggtattctacgattccttctaactaatgtattgaaactgagtaagctcggaggttgtcgccaacttgggtagggctatttccttggaacctttcctatgtaggatgcctccttctactccgtacacctatgcctcttgggtgtgtgcttgtcacttctattcttgcgagagttgcggctgtggtgtacttagcatcgccacatcggttaaacttgcaaatatgcgacagactctacagacaggggcaagactcgaaccgcaagaaaaacctaagaaagtggcacagcatccctgcgccaatttctgtcgttccaaatccaataaacatgagaagacccaccactctggaatggcagcgaagatatctgcactagtcagtgagggtaatctatataaatgaacaggctagttgttagcaggacgggtgagccactgctggttctttgcctcgaaacgctctgcgctggcggtggccaagaaccgtcggcagtgaagctctacgctgaacctcgctgcttgagtgaaattcgactgatgctaagagaatacatattttgctgtgatacagcacagggagtagtatgtgctgtcatcatatagaatgttattggacaatgcatgtttctccctgcaggtactcatccgcctacagatagccagtcgtttgccccattattttcttccgatgtcagctgctcatgtataagctagctgcggcttgggaaaataaccaaggtacccctcgacatcagaaggagcatagtgactcccaaggttgtgtactccgtagactgctgacttggcatccaagactctaatgctccaacgatactaaccacttattaactgcctaggatgatcccgaggtcatgaaaagcatataatggcagttgatcaatggaatcgttatatcatttcatatctgttcagtagtgatccaattcgaattccaatcaaccctcacgcccccttgtctggaccagacgccgaaaaataaaagtagacataacatcataaaccaaatttgggtaaacgcaaatcactctgctgccggggaatcaaaaaagaccaacaaaacaaaaaccggaaaggagaatggagaaagaagaataaaagtcaaatccataaaacatctaaacaccaccacggcccatcctctcaatggaactcatgatcccgcctcgaccgggagtaggcattgcaatgccagatctgccattgccaccgctattgccacgagaatgaccgccaggagcaccgaatctagggatcctcttttccgtagtggcagggggacggatgcttccagacacagaacggctgacactgcgacgactttcatcaggggtgacttcgcgcgatggctgagctggctcgttgacgtggtcattgtgcacagaagatgccacagagggctcgcggtctcgaggctgagatgggacgggcggctgctgcatggctagccactcatcaacagcagcaacaagctcgcccttctcggcgcgttcagactccaggtctgcacgaattcgctcggtattttccttcatagcaacaatttctcgctgcagacccttaatctgggccgccatgacacgcttttcggcctcgtgcttgtcattctcgcgagcgaagagactggtattagccgcggccattgaatcagactgcgcggtatcacgttcgacgcgaagatgttcgttttcctcgcgtgcagcagttagcttcttctccgcctcgcgcaagcgcttctcccagcgagactcgtagctctttttcaaggccgcaaccttggtttcatgcttgcccttgtagagcacatgaagctcacgagcgaccttttcaacagcatcctgaacttcccgagcagtgtcttcagctgagtgagaggactgatgagatgagctggcgttactggcgctagatgcagccgcagcgcgtgcagcggaaagctgactttcgagctcaacaacttggccttctaaattttccctgtttttctcggcctcttcggcccttcgagacagacgctcacgctcacgatccccttccactaattcagagcgggcggaccgcagcactgtctccatctcattgactcgacgttcccactcggcctgttccatctccagcacctctttgccggcggcttcgttgcgcacttcttccagagcttcgccgacacgtctctccgcgtctgccactgcttgctttaggcttgcaacctcagcctcttttccgctgagagtggctttgagggaagatatgtcagacaagaatccggacttgagtgactccaattcacggggagtgaccgtgggaatggatcgaggggtaggcgcagccggaatatcaaagtccaaaagtgacgacatcttcccaggagatcgaatggattggcgcgccgatcgcataggcgaacgccgcgaagtagagaaacgggcactttgcatggactgacgagggaagaaattcatttgatcggtgaaatcaagcagattagcagagtcacctgggtgagccatatcacgtgggcctctgggtctcggcgtaggcgatcccgtaggcgaatttccatctatataggcactcgctctgtatgccctacgccctgtgcctggggtggtcggttcggcaatgtgtcgatgcccgtccatggtgggagctgggctgggagcgacacttcctcgcgttgatttcaccggcgactgggcgcgcagcttcgcaaatgtagtcatatcaggcatagcggaaaatgtgctcaagcaagtgtcatccattgagtcgtcgaccatcgaattctcgtgtgagatattctccttgtcgccatcttcatgaagtactgtgctcattccttcattgtgcctgtcctctatcatgctgttgccaattgctgatcggtcttgcacggcacttgcagcggaaaggacgctctgttcctggacactagggtcctcttcaacatctatgtggatcgctggtgcatctggtcggctcatcatacccttcttgtggcgctcgttcatctgtaaaacggcctctagatcttcaggtgtttggtcgtaagatcttttgcggggagttgcagcaactgggcgctggtcactcagtctaagtgatgcacgagaaattcggcgtgacttatgaagatcaagggtgttgtccttgggactcgaccggaaggacgagttaagtactggagtaggggaagaagagttggatgctacctgtgacttcgcatgcgcatctaactttggggtatcaactgtctctggtgcttcgtcgcggacgggcgagttcggtgtcacaggtgaagaatatttagacactattggtgaatcttcttgcacatcatgtagttccgatggatcggctgtcatgttttttgcttcattgcggataggcgaactagagggatcgggtaatggccgcgattgaggaattggcgagtcactctgcatttcgcgcaagcgatcaaagtctaccgtctcttcccgcgcatcagggcggaatggggagctctccggatcttctagagctagccgccttcccaacccaggtgacataggctgaacctcgcgcaatttttgaaaccccactgtctcttcccggacatgaggacggaacggggaacttgcggggctctcctcctccaatggctcaagctctgggtatggcagaggagaagactgttgctcttcgtggatattttggaaattcactgtatcttcactggcattaggccggaagggagaactcattggctcctctacagccagccgcttgtccaagccagttgatatgggctgcagttcgcgcaacccccggaaaccaactgcaccctccgtcacatgtggacggaatggagagcttataggactctcctcctctagtggttcaagttgtgggtgtgattggggcgaggtctgtcgcatttcgcgttgcttctggaaatccacggtgtcttcgcgcccatcaaactgaaacggtgagctagcaccgtgttgatatgattcggcatcattgaaatcgtcattcgcgtgttcattttcgttctcgggttcgtgagggtagtaggtttcgtattcattatagccgttcggactcggggtagcgtgacttgtccatcctctcttcaatgggcttgagggagcaacattttccgagggctgatcaagggtcttgtgaaggaagggcgaagaattcgccatttgagattgtgcgcgcgcgttctggtaggaggatgagaggggcaagagtggatttgacattatcaaagccaagagaggccctcgagaacgagggtgaagattgttacaactgaatcgtgcgaataggtctctggtcttttttcagaactagttcgctggacaagaagagagcagagcaaggcagagtttgtgtagttatacaaaaagagttgcaaggttgccgtgttgacgttgctgggtaaacagagctagtctcaattgggaaatgtgcatcccaaactatctaatcggagtctcggactaggtatacaacacatatccctgtctttgacgacatagttcagttatatgaccagtttagctcatagtactagggatagaatataattgctacgcttcgatccgcaatcaagataccactccgatgtcttctttagatgtcttcctatatgtctttcaagcgtctttcaagattctttctagttgttatgttcttttatgtctccttacatattttttttagatagccttgctgtattggtataatatccagcagactattgaatacatgtagatagaaagcatgaccctacttggatgagtgtaacatacgagaaggacaatgccctagacgaagcctctgttgataatattaatgagatttatgattctactagtctagaactctagttctaaaaaagacccccattagaccctcgtttcctaatccgacaattacgcttctgtgtgcgcaccaccttcattgacaataatatgaacgatgtcgtcgtgtggctgctctggaagagcaacataatggcagacagccgctggctccacggttgctgatgaacgtttgtcgcgctggatgaaccacagctgtaaagcaccgaataatgcaacgagactactcccccaccaggcaagagcagtgcagccaatctcagctccagcactgtaaagcaagccagaaatcggaggcgcaaaagttcgagatgcagccccagcggaagcagcgaggccattgattttccccatgacggagtctgaggggctagcttgcttgatgagaatcaagaggaggggatagtcgataatggacaagatattgcgaacaattaaacaagcataaataccgacatagatgagttggcgcggcaaaaagaccaggaagggaaccatgaagtatgcaattggatggagcaccgtaacgatgacaaagagccgccagattcccaggtaatgtgccagcaaggggaaaatgatgctttggatcacgagggcaatgataccatcggtggacatgattacacccacagttcgagttgaaagaccgactccgcccgggatgtcaaagggcgagtggtgcgaaggtgatggccctcgggggtccttatcctgcaagaatatgggcaagagatggtcatatgtcatcgagtgataagtaaaaatagccaacgcaactacaagcataatgactcgccaggtacaagccttgggctttggtaatttctttgtcggcgaggacccatcggcttgcacattccaactctcgtcattatgaaggtggacttggttaaaggtcccgtaagactccgctcgcaggtccacgccagcattggcggttgcaccagatgtaaccagaagcggctgctcagctgcctggtcgagatgtcgattggccttgccgggctgcatgtctggatgggtctcttgcaggaacagccagctaccgataatgctaaggagaagtaagacgcagcaaacaaggttgggcaaaaggtaggggaattttccaaagaggccatcggctgggaataaggatgggaagccttcagttggctttgctagcaagcctccaatggctgaatataattagcatttgcagtagaattctataatgggaagactatacatacctggaccgataatcgttccaattgaccaaacaaaaggcatgatggcatatgctcgagctggagacaagattaatccctgattccgctagatatgacataatagagatgtacttacgttcatgttctggtcgcttgacaagctcactaaccattgtttgaattactccaatgttcccattcagagctcctccaagggctcgaccggcgagggcgatccagaagttcggagccatcccaaccaggagcaaagaggccatagtaccgaaacttccagatataatgataggctttcggcctacgcggtccgaaagagcgccccagagcataccagtcaaggcctctgcgagcgaaaacgccgaaatcaaaataccggcatagaaggaggcattgttaccattggccatgtggaagtccttgaccatcacccacgagtaggggaagatagaagtcaaggcgataggctctgcgaccctgcatattgctgttatgttgtgtcagtcattgccaggtacaaacccgggatatggcatacctaggaggaaaagttgtgctgtgggaaagctgtctggcgacggatgtagtcttgactgtggtgtcaatgccatagttcttcagaagcagctaagatcttacggcaatccacccggcagtgtcgagttgatctctgcccgtaccttgtaccttataagcggaaggttttttttctttctctttctttctttctttccttctttttttaatatcccaagaatgccaatttcatttatctgagaatataggaggatcaaggtggggtgaggttgagaagtcggagaggggagaaccttggaaagatactttattttccacagccgagaacggacacaatctgatcctgacccctacctaaaggaatctggaactcttgatcctttacagatactctttcaaagagatatggatagagatagtttgaatattgtgttatactgtagtcttatctctccaaaaaaatctgagtggcgaaccatattttgttcgggtatctcggcaatggcccgtgatattgtattgttcaataatgattagttgtcgaattaataacagaatatagcataactaatgtaactatgacatatcaattatataatgttatatccagtaaacaacactgtagtctttcgatgttccccactctgctttcttatatcccagtcgaccaatcacaggccacataatcatttaagttagacctactccgtatagatcagccgcatatgtacttcacatgttataaatgattgaatataacgtcccttatatcatctaagccaaatggatcagtcagtaaaatgcgccgtcaatgacagaggaaccgcataagcggccggctattcaaggttatacttatgtccatagttgatagttgtatatgccgtgcctaccctggacatagatatattgaaagaaatcagaaatctcactattcatcgatctgaatgctaaacacaaagaatttctatccttgaccaaaaagtaagaaatgatgatatgaggggggaaaaaaaaccatgagcacagaaaaagataagtagagatgcgttcaccggtgaccaatcccctgcgccggctaatccacacatgtcatacggtccggattgtatctagataccaaataaagaaagccaaactggaaaaaagaaacaaaaaagaaacaaaatcaaaggattcacgaagtagcctctggatgcgtgggggaactagtgatttcgacagagcgggtctcaagttccttgggaagggttccagagtgatcatgagactccacatgagactcaacgataggcgtcgattcagagttcacttctaaaggctggtggaccgacggtgtggcacttgaggaagagccctctgtctgtagcttgttggaagtatcctcaacgtgttccgaagagtcttccactttctcctcatctccaataacagcagctagactgcggaaattgaacatcggctcaagagagttggtgtttccctctccagtaggaggaccacttgtgccatcctccggagtgatttccatgacagaggagagcgacgaagaagcgctggagacctgtcgcaggtgagattgtcgtgacggctcggacagatctgccgattggtttcctggtgctattggttcaagcagcgtaggggaattcgtttcttccgcggctgatggcaatgcacgatcaactcccttgcctttactagcagcagcgatttcttcaccaacgacatcttcgcctataacagaggatgagctactagtccccttaccaatactggactcgccgaggacatccaaagcggaggcgctagcattattgctgtacaagccagtcttgcgagccatcttatccgccttcttagcctctttctccctctccttctccctctttttggcctcctttcttaactccttctcctcccgtttgaggcgctcgtcttcactggccaagctcagtcggatagcttccatcatcatcatttcctcaagatcgtcgattcgattgcgtctcgagcttgatcgaggagcagccgggttgcccgctccctcttcggtagaagcagaatcggtgtcttgtgcagttgctcgaggtgtccgatcagcacccgtacgctccgtcaagaaagccaatgcattgagggcgggtgaagaggtccggccgtctccaccggtggctcttcgcattccgcgccgtccgatgccaaaaccccgtgactcactcccagatgcactggggttgatcaaatacgctgcagtgtggagggcggtcgctgccgcagatcgacgtgccgcgtgggctcgtgcattcgataatttggtggcccaatccggtcgaatcctatcagtcgtcaccacggtgggatcagtggcggatagcgaggttgcacggcggcgacctggaacggctgcggtggcggatgataaggaggaggtggaagataagggggaagtgaagttaggtgagagccgggccccggggtctgcagcataaatcaggccccgacggaatgagggtgatgaataggtgactccgaactccggctggacacagaagggacatgccgatggctccgagactaattgcgactcggtcgactcagcctgctctccctcagctgaaggagcattcgcgtggggctcgccatgctctggggggtgcgggtcagggcgcttgatctgcacgaagcattcggagcaaatgggttgatcgcagcatcgggtgtggtttaagtatggcggatagtagaggaaacagataggacactcgcttgcgtccttgtacaaattgacttcgatgggctgtccgttgacaaatgggtccttgggaagctgcagttcccggggcgttaaatctgtttgcgagttatgcttggtggtcaaagcagccaaggtcttcgcccttgttcggaaaagaggggaggtggatgtcccggatgcgatgggagatgcggagggtaatgattgaggggggttggaggactgcgaagcatctgaattaaaagattgcgatctggacgttatcggcactgtgagatgctggatatttgtcggatcggcagaggctttgtctgcggtcctggataaattgtgctccaactcgggcgggatctcatctggcaggggaatgggcatgcctcgggcagccgccataatctgatgctcagcccacgactccgagaagtcattaaggcctttccagaagggagccagtcgacgttcgatctaacccgcggtcagccttggctaaattgcatctagggggattccaagcaaacctaccatcagttggcgcaccactaccttattgtagtcttctgtccccacatatacgccctgcgttacaaggtagcctccatcgacatgctcctccttcatactgcgctccctctctttaagacgagccacccgttccttctccaagcggcggacctcacgctcttgttttgtctcccgccgattctccagcgtggccacttcacgatcatgactgctgccgattccaagaatcgaaaggtcgggcctactgcctcttgctgcacgagaaccttgatatggccggcttgagccatcggaagcgcccggggataattgacttcgacgacctgacggggctgtggagcgtgactccttagtctgggagtttcccatgttagagcccagatagatgtaataaggtggaaggatggcgagattgtcgggttcagccacgacagttccgacagtcacggtgataactccgggatatggcggaaagggcccccaaggggggttgtattgggggtgggcagtagaaatgggtgtaaagaagatggagaggtttaaaaaagttgaaaagaggctaatagagagagtggaggtaagaggagtaactttcagagcgggggggggtttgtgatctgtccggagtaactggggaaatgagatcggtgaagactttctaggacaacaacctccatgaggcccaaatgatatcaagaatatttacaaattcgagattgcaatattctgatattccaatagaaaagatagaaagatagaaataccggatgtggcggatgttatttttgttattttttaaatttttttcttggggcaagtatacctgtttgtctcatataatgcctaactagactagttatgggaattactacaaaaccacataacatgtatttatacatatctatagcatatgataggtaggataaacaggttaaatagcataaatatcaagctttttactaattctcaactcaagatcatcagttgatccatcgtcattgtcaagtcatgggcagatacactccacttccaccactattgatagtgcgatgtagacatcataggctctaagatgtagcaaaatgattgtagtatagatctcaaaatattacaattaactgtggaagtcaactagttagttaactactccgtacgtgcataactagttgattagttactggaggcaacaaggccaattcaggccaacacttaaggccaacatttgatcaacctcggaacaacctcagccaataaaatctacatacaaaaggcggtggcataaataagtctacattatttttttgccaaagaaaaaagatcgaagagcggtgttggaccaaagcttccacaaaattattttggaccttgacatcctgcataggccatgcagtagtgatagctctactcattctcactcctaccgagaatcctctggcaatgactgaaacgaccagactacatatcacgcctttcacccaggatatccttccgtctgtgctgccagcatctattcgcaacttggccacagacatatctttccacgagatttctacattcccagagaataactacggatacgtgactctgccaaacatggaagcggagaagatcaagaagaagttgaacggctcgatcctcaagggcaagaagttcaaagtcgaggcggcccgccctcaaaagagacaccgggaagaagaagatgtggtgcctgaagccccctctagtgccaagaagaagtccaagaagtccaagaaacaagcgcccgatgacggtgtaatggaaggctttgagcttcccgccgaccgcaaagtgaaacgaggttggacggagtccagtgatgctaagcaagaacgacgaaagtcggagaagaaggacaaaaaggacaaggaggagaaactgcaacccaagtccaagtacaccgacaaatccgaatgcctgttccgagcaacaatcccacccaaccgagcatccgacgcagcttccgatgataagaaggcaaagaagaagaagaagtcgaaggataatgtcatccacgaatttgagagaacggtgacccagccaagcttcctgcgcaccgcggaggaaagcgcagcgcctacggctacatttgaagatggaaaaggctgggtggattccaccgggaatctgaaagaacccgccagtgagaagatctcgaaggataactatcggcctggtcagatcccaggggctaaggagaagcgccgagctgccaaattggccaccaaagatacgaagaagcgttcgcgcaaagaaaagactccagaggaatcttccgagtctgaagattacacctcatcaagtggctcatcttcagacgagggcggtgactcagagagtgaggtcgatgagaacaaggcagatgaaatccccgaagattcatctgcatcctctgacgatgaggaggaggtcaagccgcaaccccaagaagagaccaccaagtctacagaggctaacgacggtgatgctgatacaccgagccagtcagactcggataagatacccacggaggctgcgcaagaagtgaaaaaagattcacctatcaaggaagtccacccccttgaagctcttttcaagcgacccgccccaacaacatccgataagccggcaaccgaggccgaggctggattcagcttcttcggtaatgacattgaatccgaggacgagtctcaaatggctgagccgcagacacctttcacacccttcacgaagaacgacctacaaaaccgaggtcagcgcagtgcagctcccacccccgatactactgcagccaatcgacacatgacgtggaacgagagtgaggactcggatgatgaggacatctcgatcgacagccctgtcaaaaaagctcgcgcggaagccggtgcaagcatggaggaaactgaattcgcaaagtggttctgggagaatcgtggtgagaacaatcgcgcctggaagaagaggcgacgcgatgctgctaaggaacagagacagagagacaaccggaagaagggaatcaaggcaaagtcatagattcaaaatatgtacctagatctgatgtggtgcttatacataaactatgctgctagtagccttcaaatgacacaaacactatgtaatttaagccaacgacgtttccaacgttggtcaaatctaaatataaaaaaacctcatggtctttgttggattgcgtacacagtcatgtgacccgcattcatcatcattaagctcatccaaactaggactcgtcgcatcgtccactacgtgcccaggatgttttcgacctggacctcacagcgcagcatacagctgttgttgctgcttttcacatttttgtctctcacgtcattggtagcagcatctagtaagtgctaggctctcttctccgatgcctcgaagcgccaagtcgaagatcgaattgctaccatcttcgcgtcgatatctatgtgatactaatactcaatgctaacagcaccaacctccttctgcaaatgcacctgtttctccaatagtacgatcatccccctcaatcctgccaagtccgaaagctcctccggcatcgaccacgtccgcttttacgagcgcgactctctcagctccgagcttgagcataccgatgaatacagcaaacgagccgagaaataccgatctctgaattgtaatgattgcaatcggaaattctgtctcgactacgagctaccaacatgcaaaggcgctaaggaggaagatgtgtatacgacttgcttccgtaagtgatttgtcggactagcgaatcagccaagagaaatcgaattggatactataacagatttgctgacggatctgcggtactagagcgagattcacggaaagacgaggcggtggtgtttatttttatttttgctaccggtggactgctggcttgggcagcctgcaagccatggattgagcgatatgtcgaggtaggtcgatgcaaagcgagatctgtgagaaacccgactaactgatttaggctgcacgagaacgcaggtcgtatatacccgttgctgaacccgatcgctaaatatgaaatgatttgatatgattttgaatgtacaattttgtaggctgaaatatctagcaaagagcgtataattccaagacttgagactaaattcatcaacatatacaacatacggagtagggatgatgccatggggaatttgagctcgatatgatatcagtaggaggaatgtactataagttcaggggtaaacacatcaacacttatcttagtatacctcactagtaacatactcgcataatctacttcgtactagttagtaagttgtggtagatagatctatttatttagctatttagcgcttctagattgctacagatccaatccccactacggactatctgaaacaggatagattgggggttatggccaaccaatagatccgatcagccagagagaatgtgatttaataggcattgggggatccttatatatgtgcacacattggatcggctaacaattgccaatcgagtggattcagagagaaaacttgtttaattaaattaaatccttttcttgcttttttttctctaatcttcctattcttctctccttaaattgctctctcttctttaagaggcccgatccccttcatatccatatcggaactggtggcgttgattttttttgtaatatccagcgatagtatatactggaattcaaaatatggctatcttcgactcagaaaagcgccctcgtggccttcgcgtgccctctctcgcagcattcaagtctttccagaagaaatcgtcggaatctgtgcccaccgagcctgtgccctccggggagtcaacttcgcctaaagcgacagccttccctacccctccaccaccgaagccggcgcccccgccgggcaaggacctcccagtgcccccgaaagaggaaattcccacaccgcagacctcaaccaacaacccatacttccctccgatcccctcccaaaatgcagtcccagaacgacgcccaattgaacgggtccccaatccaacgcagtctcctccccctcggatgacaggcctgcgaaacaagaaatcacagcccgatttccacgtaccccaacaacagacaacaaactatttcgcgccccaagctccggccgacgaggccaactcccccccgctggaagacttcatcccgaccccggacagcgccgaaccgccactaacagtgtctgaactgccacgcgatgagctgtccccttcgcccttcgtaccaccggatgttgaacccgtggcgccgaaattgaacgaaatccacctcacatgctaccagcaacaccgcgctatgcccgtagcgcagaatgcgtggtgtccgctgccgtgcatgacttgtcagaaatttgacattgagatccggcaccgttgtgtgttctgttgcctgcgcatctgcgagtcgtgctatcagactctgcaaaaatgcaagaatcgatccgtcgaagaactggtcgatcggctggtcgtctgatttgttgatatctcaaggtggtgttatggtcgtggtgcgttgacctgaatgacctcagcatatattgcatgatctcttgcgcaggaagtacagttcctgtaaggttgtcagctatgttttctatttttcttcttatctgtatacctttttttatgataccaagagctcgtgtatatattatgttttaatcaggaggaccgaagctgcatgttaatatgaatagatattctttttttggggggttccttgacataagtgtagcatttcgtagagatatctgagagtttggagaagctatgtgctaggtcagcttattgccgcgtcaagaatactcccatatggtacaaacgtttctgagagatcaatcgtgatcctcctcggtcagaccaggacacccttccagctcaagatccgtttcataggcatatttgcaccagaaacaataccgatatgtctcgcgcagaaagagaaccagcttgcgtaaccgctcagctggctctaacgcattgaaggcatcgagctcctcgtcgtcttcttccagctctatctccattgtggaggtattctgatccagttcactgccaagggcctttttatcctcccgatccatagtagggtcatcgtattctggtagccgtgctttggggaaaaatgaagaagggagtgaggattggagagcatggcgtgtctgacggtcactgtcgttcctttcccgctcacggatgagacctcggtatagaacgttgatttgcgacgtgagcttgattggcttcttctttgtcgcggctgcgttgggtccgtcgcgtgcttgactaggatctgcggagtcaccgccttctttgttggacttggctgaggaccctatttcttgttcttgatcttcgtcgatgatagccccactctccgattccgcatccagcctctctgcaactttctgcgcagcacgcacctgcgcttcgatgcgtctcaactcgcgctcttcacgaacgcggtctcggtaacttccttcctcgtgtttgattttctttactgcttcttctgcctcctcacggagcttgcgttttttttcagtgtccaacccgattccgccgcggttttctttcatggttaggttcagcggttcagcgcgcgcctttaggaaagaatcggtagtgacactgccagaatcgctcgctgcaggaggcttgccaagcaccccaccaggcttaaagccaagctttgccatcatttggaatcctttgttggtggggttgagggtacttgtggccaaggcttcctctcggcgggcggcttcccgagcagcgcgttcggctttcgatgggactcggcctcgagcttcggcctgcatgtggaaaagaatgttagaataggtttggaatctagccggagacagcgttgggctagaatgtgaaggatacggcacctctcgtagttcgcggcgctttttttgtgcgaaggtctccttttgagtgggctcctcaatgaccatattcatgtagtcgtcttcatcttccgaggccattgtttcggttgccaagagtcaaggtatggcctagacgctaaagaaggggagagaggaagaggaagagatccgcaggcggacaaagaaaacgctttgggttttgcggggaactacggtggggctctgattaattaatttggaggctctgattatatacaacgctattacactattaatgtacactatataacatatattatgggattatagtacttaagaagaaatatatcaggtttagtagcattttcttcggtcttttatcggggaaaaatgtggaaattcggattaaaatcagctagttatatgttatagaccaaaacaaagacgctatttatgccaaggatcactgtctatctttgtttatatatttagactcgatggtttcagatgtttcccaacgtctcacttatgtttcttaccttaaagactatatagatatactgttgcttttgtaatgaaatacctcccaagagcatttaaaccatgattttcgttcctgttacttacttctgaggccaaatagcctgctcaccgctaaaattacatacctattatgtctattatggatggtgttcttccccgtaaagatcccttactgtacatgtgacacatccccgcaagcgtctgtttgcatatctcaatgaagcaacagtggcgcaagggctttgtctttgtatcactgtctaatagctgagttcggtgcattgtcaccgtgacttcgatagacaatgctcggcgttttctcttgtctccgcgggaccctttataagccatggcatcgaccggttgacaatcagactgtcagtcaccatggcgattttcttgtatatctgctctttgctatctctagcatctgcttctacggtggtagatctcggctatgctagctatgaaggtcgcacactatccaccggagtcacacagtggcttggcatgcgatttgctgctccccctgtaggtgatctgcgatttgctgccccgcaggatcctttgactgtgaagggaatacagcaagcaaccgaggtatacatctcttgtgttcggttatctataggtggctactgactattcactgctagcatggaagtatatgcatccccacagcagcaagcgaaggccggacagtcccagcaggaacatcagaagattgtctgttcctcgatatatatgctcccacagccgcagcaaaaggctcaagcaaactgcctgtctatttctttatccaaggaggaggctttgcacttaattcaaatgccaactataacggcactgggttgatcaaggcatccggaaacaatatggtcgtggtcactttcaactatcgggttggaccgtacggatttcttgccggagatgaggttgaaaaaggagccagtctgaacaatggtctgaaagaccaacgcaaggccttgaagtgggtccaggagcatatcagcaaagtaggtcaagccgtcattcctcatttttttttttcgtggctttgttgtttgatacctggttttgacactatcccagtttggcggagaccctaaacatgttgtcattggcggtgatagtgcaggtgctgcctcggtgactctcatgctctcggcgtatggtggcagagacgaaggcctgtttgttgccgcagctgcagagtcacagagctttgcccagatgctcaacgtcaccgaaagtcaatttgcatacgacgcgctggtaactgcaactgcatgtgacagtagtcaaaataccctggcatgtctgcgcaacctcgatgtcaatgctttgcagcagaagaacatcaacagaccatacccaggagcaaaggggaagccgttatacctgtatagccccacaatcgatgaggatctggtgccagactacacgtaccgcctcttccatgaaggcaaattcatcaaggtacctgtgatatttggcgatgacaccaacgaaggcacgaaattcgttcccaagagcacctccagtgtcgatgaagcagatacgttcatccagaaccaatttccagcaataacacaggcccaacttgccaagctcaacagtatatatcttactccaaaccagaaggagacattccctggcgctggggcctactggaggccggcaagcacggcgtacggcgaaatacgttacatctgtcccggaattgacttgtcttctatttacgcagcggcaggtgtcccaagctggaactaccactacgcagttcaggaccccgccaacgagagctcgggagtgggcacacatcacaccatcgaagtcaatgcgatctggggtccgaccaatactaaccaaaaagctccagcttcgtactacactaccaacgcacccatcgtgcctgtgatgcagggttactggacaagcttcattacgtctctagatccgaacaccaaacgtcttccttccagtccgaaatggcagacctgggaccaaggtggtgatgcatatcagcggattttcattcgaaccaacgagacgaagatggagacggtgtcacaagcacagagaagccgatgtgaatatttgactagcattggtcttgatttgaagcagtagcagtatatatacccctgggagtaaatgaatttgtgatctactgaggtcaggccttttaactaatcgaactcctactaaatgaccatgaactacttaggtacctctacatagtgtttttctatgccgggtgcgtatgtagttcaatctacgggatctttacagcaggagatcgatagtgcacctaagcactcgtgaatcagtgtcggtctccgctaaagtagacgaagaacaattcgaaagggctcttgtgcctagtccccacgacctattccaggcaattgaaatgcttgcatgcgacagcggtcacctgggaattaaagtccattccaaggttaacaccagaatgccctcaccaaaccaagattctgatggttccagggttccgcctagagatggaaccaagaagtgcttgtttgtttcgtttattcttttctttctattctctaaccttggaagtctcaatcagggagctcaacatggcctaccgagacaatatcgtcgtcagaggaacctaacacagtcttccctgctgactttccggtttgtaaccgcctgagatcatcaccagcctccgagaaatccaagagagtgacaggagaaggtggggagataatcccttccagatagaactgaagcgtgtctgctaacaaagtctgaatggtgggtggtcgaagtttcatcatcacgacaaggtcccctgctgcggaagtaaagccgccggtaaatggcttcatgtcaagtcgtccattgccatatatatcgcgttttttgagctctatgagcctccctaaaggcgcaatgcagctccatgagtgacgcaggagttcaccaccgagggagttcaaaacaacgtcaacgcctctttctcaacatctagaatgtccttttgttcaaggcactcaaggtccttgctttcagtctacccaatggcaggtagcacttctgtcaagagttcgatgacttgaatccacatgtgtaagaacgacgtccgtgaattgaatctgcattgttgaagatgacttgtcccaaaatgttatgtcgcttttcagtttcttcaaaaattcgagtgtagcattgtgacacagaaactcgtggctaggctcgctactgacatcagacgcaatctaaatttctcaacatatccatggatgccgggagatatacaaaccgtattgttcatacaacaatacaaactctattgttctgtgaataatataaaccctgttatttacggaacaatacaaatcctattgttcacagaacaatacaaaccttggtacctatccgccaacctctggggtataaacagggctctcatacttcttcttcttcttccctccccacccttccaggtttcttcaagtctttacactattcatcttctgctacaatcttcactctggtatatcacttcactttgtaccatcagttcactccagtacatcatcacttcttcactctggtttatcacttcactctcagtcgtcatcttcagtcatggacccctcagtgccgtctctagggccttcaggccttcctacacccccgctgtctcctcgaaaacgacgccgccaccttcgtgagtccgatgatgcagaaggtgacatgagtcttgagcagtacttgcagcgcgtcgaagtttaccgatcgaccagtatccccagtcggtttccttcgccagtaaaactggaggttctcccttctcttgagaaagtactcaggccactctaccctgaagtcagttcgatactgaaccaacacaatctgccggggatgatgatgtatcggtgttggaggatgaccaagccggggtatccccgtggtgacatccccgtcgatattttcagtgtcctccttgatacctcgactccaaacatctctcctcttggccctatcaaagacgagatcttgagcctcttccgtcgacacaaggtcagagtgcatgtcgaaatttcgaacgacaagctctgccaccacccgacatttttctctatcgccttaaaccaccctcttgtcaaagcatacgaccgagtcatgcagaatcttgtcgccatcctgaagcagacacttggttccaacttcaatatgctatgccccttcaacgttggtccgaatgaagccaaggcgcagccgaccattgtggtatttgtggagccatggacgattacaaactggtttgagctgcgacttcaagtcatgtctcgactcttgccacacatacaagcggacagctttgacatcgaatttttacccggcgccatgtcattcctgaatggaggcggcattccgttcacacacaacgtcaaagagcatgaggttccccgaatgggatcctcgatcggaattgaaggagacaaaaacgccggaacgcttggcgggtttgtgacattgactcacggtgatgtcgttcgtagaggttttttgaccaattaccacgtggtcaggccatcgccgtcccaacgcccctctgacagcaacgatttcctccaaagtctcgaccgtttcggctcctcccctgtgcgccctctggccaacaaaatcacgatggaatcgccatctggccctgataaagacgccaccgctgcccacatttccgagcgcttagaggcaatgcgcgaacacgagactgaactgaatgccaaggtgcaagagcgagagctactcggagctacaccaaatcccggaatcctggaggcgctttcaaacacaaaagattctattcaagaggcgttgcttctacgttcagtcgtcgaccgaatgccgttcagcctaggtgatgttcagtttgtgtcaggatatgaagtgcacggtggtcacgttatagactgggcattcgttcagatgtctaaagccgccgagccaaagttcttcaggccaaattttatgccatcggtccctaagaagtaccagccagagaaatggagcccgtctcaaaattctgcaatctggctaggaaagaaacctctcagtgagtttgggtcacttaaagatggggattggtgttgcaaaaaaggtcgtacttctggctttactgcaggtgtagtgaacggccccaaagcatactgcaagtggaatggccctgaagtaagatatactccgagcggacaaaaagttgaaatgcgtgctcttgaaactcaagagttcgtcattgtgggcaaaagagctggggtaaatgaggaatcgttctgcacggacggggactctggttcattcgttctcggcgagagtggagaggtcaagggtttgctgtgggggggtatggagaaagacaaatggaatttggggctagcatcaagcatgcctgatgtcatggcttcgatccaggagaagatgggagggtccgttacattgagccttccggcttgactcattgatctttcaaatctgtggacatttgcttccaaggttctgtgcttattgaactctagttgcattgcttcgttgaaccccattgcgtttttatagcttcatttgacgtccagtaccatgtgccctgacataggacgtatatttatacccgagatccgtactcttgtaggtatactgtatacctgggctggtcatagaagcaaagtggcaaatcattatatgcgatcaagattgccgtcgaaggagaccgacggagcaacaaataaaaagaatctaaacaacaaaatatctattttttagcactcagatggaaagggaaggccaagaagtggcagaggaaatccgctatctaggtagcggattttgtagatactgtagatcttgatgaacttgacttttattcccacccttacgccggatgaataatgatatatataccagcccaacaggatgtacaaccatgtgtgatatatgaaaaacagatgtggaacataagttgaaatgcaagattacttcctgccacgcgcccgctcgtactcgttggcagcacggccctcctggctctgaatctccgcaaccagacgcttgtacttcttctcgtactcggaatcgcgctctttcttttcgcgcagctgctcgcgagcaacgaagctggcgtccttgcgaagctcgcgcatggcacccttgcgctcgcgcttgaactccttcttgagacggttggactcggcacgctcgcggtctggatcgtagtgcttgtctgggttgaagttctcctcgaacttcggaatggctgttttgatggccaagggtttgtggtcgtgcaaaaacagcggacgacgaacaagacgagcttgtgcgaggtgggaatcgatcttgttcagggtgctctggatgggttcccgggctgctgagtataccttgcctctgagggattggtggaggtgctgcagaacggcacggaccggtgtgaagatctcggtgaaagcagatttctcggcccaaatatcggaagcggagccaaggagagacacgagagtagcgaggagggagatcttaagctcctcctgcgcctggggatcagaaggagaagtggtcacgtcgcggaattgcagcttgcgaggtgtcaccttcttggagggcacgagctgaacagattcctgtgactttctgtaggggaaagctccaaacttgacagtcggttccgtgggagcaatattgcagagagcatttagagtgtagttgataaactcgggcatatatctcttcgaggttttttgatattggagacaaagactcgcggcatatgtaccacttgcaaggtctgtgagcgaggcggtggtgcactgacccaggtaacgcgctaggcatagatgagcgggtgtggctgtcgtatggaagtgatcagatgtggggaagaaggtcgagaggccggtaagcaagatgaggtcgccgggtaatagattgagtgggcgttccttgccaatctcacgaagttgggctcggcacgcaattgtcacattcaaaggatgggtcttagccaaagaatgaatgtgacggatgatactctccagaatggcaaatggaggttgctcagtctcgttacccatgtaagaaacatgctcgacaagaacttcagcaaatcgaccaagcttgtccttgtttccaggcctaagccgtggatggtgcaatgctcgaatgcgctggataacagtcgggatttcctcgacaggtacgttttttgtgatactcaggaagctctcatggtcttttggacaaggatacgtgaatgcgagctttccgtttgcttccttgttaatctcggcagcagtcgaagccgcagcggaatcttctgtcggcagcgtcattccgttgatgagctcgtcctccccatctggcccgtcagactcatcgctcgacgaagcctcctcatctccttccatgtcactgtcacccatgtcgaggctggcattcgaatctgtctcgactagatcttcgtcgatgatgaaatcatcttcatcttcgacgccaagttcagggcgtgtttcgctagggtaagctggaaggccgaaatgcgtagcatcgtcaatttccgactcgtcatcatcgggaatttcgtcctgatccatactgtcctcttcgtcgtcagtgagctgctctccacgcattcgtcggaggcgatcgttctcaagtttcttgagccgctcagcctcttcctccaccttctcctcttcggtcttcgtgcgatctgtgggtcttgatcgttgatcgaatgtcatctgtctaaggcgctgatcgtattccttctctggatccttgctattttgcgactcttctagcatagcagcacgctctgggttcatctctgagaaatcctgtctgggtgcctctgccttggtcgccttggctgcaggcttgatgccccgcagagcctcgaaaagatcaggaagttccttatccaatgcttcccgtaggtcttcatcatcatctttggtctgttgccgttccgctttgtagaacttagacttggcaatgacttctttcatgacctcggccttagtctttttgcgccctggctgttcttcgtctccatagtcaatgaagtcctcatgatcctgatccggatccgcatcctggttttcatcaccatcgggaaatcgcttccgtttccgcgacgtttcctcgtcggattccgcgtcatccaagtctccggcctcgaagtcgtcttggttcgctccatcgaacgacaaagattgacccatgtgagtaagctgcatctcatcatcatcatcctcgaggttgaacatggactccttccgcatctttctctggctctctctcgcaaatctctcggcggcccgttcctcgggtgtcatggtgggatcattctcaccgaaccggcgatcgatgagtccaccgatcttgtttcggctgttcatctctttcagaagagtggcgcgtcgctaactaaagttagctttataatcgcaatgctcaaggaaagcagataaacctactctttcttcacctagtgatttagtaacacctgggcgagcgccacctccagcggtcgtgttaccgtctctggttgtgacagcaaacttgctggatttgtttatcgtcttgatctcgaaagggttgaatcgatctcgaatggcttgcaaggcgacctcgcgctggttgcgattcttcgcaccgactccggtctttgcattttgtcgtttttctttcttggacttctgaggaccaagaactccgttttcacggagagaagccttcagctgtttgagctgagaaggcggcattttgtgtgattgggtttgaattcgagagttgggagtttttttccccgtcgtgattcccatcaaaaaaatcaggtacaccgcctccgcggtcttcgtcgatcaatattctgccgattatgttctccgcatctctccaactctcacaaccggtatggctcccttttctggggatggtgtgctatggctatgcctaggtatggcgcatttgtccgaggaagcgattttggctcagacgattaacttacctaggcgtctcattgttctttgccatacgcggtatcgctacagacctccgtcaagtcgttgacctgacagaaatcaaacaaactgagaaggaagacaagattattagcgagggaacagaagaaggtgcgcagatatttatatctaatgcattactgtactaataaatcctatagctctcaagttagacaccctcttgaagctttctcaaagcacgagccatgacctccgagctgcgtacgctaaaacaacgttattttgaactctgtgcgtcagctaatactacacagggcgctgcgcatcatttcagagcgttctaccaagggagatactcgtgatttgctattggaggaactagcgtccaagaacaaagttcaccaacggcgagctctgaatgcattgaacttcttggtttctaaccgggcccgtatgcttcccaatatgcatcattttgacagtatatagatgctcatactatcttccagtcactcgaacctcgatttgcactcgactcgccgacgtacccacctttaccgccattatcaactgcctttgcaacctactagaagaacacgtggagaagacatcaacgaccaattcgcctatttttccaaagacacggccgatgggagaaaagaaggcgctgaacattttgaatgtcttgttgccagagaacatacccgacgcattggaggcggggatcatcagccgatggctctgcagatatccattcccgtgtgcaacagccgagccttctcgccggcgggatgtggtgatcctcatgaaaacatggtggtcggatgatgtagtcatgagcgcgattttcagtgcgctttcctcgcacccggatggaatcaagcagctgcggaaacatggactgatgggcagcatgatcgaggagaatgaccaggacgatgaggatgatgcggacagtgatgtgtggatggtagacgcggatgaggcaggaggatcttttggacgatctcgttcgcgtagacagcaggaggggagtgccgaagagcaagcgcttcgccgacgcaggagagaagctatggttttgagcgacggtggacggccaattggaaatggagacataatccaacgacctgttgattatttatgatcttcaatttgtctgcaacactacgcaaccaaccgactctcaaaactagctttccagctactgtactttatgtccatgataccccacgcaagaaatatgatatgccatgaattttctttgaacctcaatataatactaaagccccatccacgctgatttggctaagtggtcggtcttcttccgactgttcttgataacaccgaacgccttcaattctgatagagcgccatagaacaaagacattacaactcggtcatcgcagccatcagcctcttcggtttcaaagacaccatagaaagcctgccagagatcatgaacattcaccagagcgcccgaatcaaggtacaattgataaagtatcgcggtggcaggttgcttggccgagacctttgtcatagtggcatccgacgaggaaagcaggtaatcaaagggagtagccagggcgcgctcgattgcaaagcgcggcctgggggcgaatgtttcctttaatggattccgcagatcaaacaagaaggcttcatgtagaaacagatcttgtgggttgataagggtttctgtgagatatacttgcaaaagagcaaccagtcggtcgacgatgttggtatattccacagcttgttccgatagatcggcttggcctttgcttagccggatacgctgctggacgacagtggttcttgtgacggtgctgttgatattgtatccactgcgcagtggaccggactccgggcacgtttccaatagagtcttgagatcttcttgaatcgcatcggcttctcgactaattaatatccctctgagacgcacgagaagttcatccagcttatcagaatctagggttttggctgcggccaccatttcttccacaatagtggactcagacagttcgccagagagtgcgcgaacagaaaggtccggcacagtagtctttttcgcgctctgtgtgtgttcaagacagacatatatgacacggactgcctggaacatgcctcgcattctttgctggtttgcatccaggtacttgggcgtctcttgaataagatattcgtcatcctctagcaaatctcggatttgcttgatagagccttcttcgactagatcctcacagaaccttgaatcatattagttgagatataacctgggaattggagaatcttacatccggaatgatggcaggtttctgacggcctcacatagcttgttttgggcgagaaccgtagaatctgggttggctaatagtaccgacagaggatttgcaaagaaatgagacatgtatgcatactgcacgaattagatttctgttttaaagccattgggatagttctcaccttgaccatgcggctgaatgcctccggactttgaaaatagtcacttgtgttttcaaacagagtattggtaacgttgcgacccagccatagattggtgcctgagtcggtctgcagagtctcatagatgcggtcgacacagttcccggcctcttggacctcgaaatgcttcccttgaaggagagcaacgcacgagcgaggcagtctgccttcgaacagctctacagaggtagagatgcctaatagaaccgtgaacggtatacggtcaagccatgatctagtagaaggtcagttgggagatcgaccgaagtctggaatgtcaatcgcacttgaatagagacagaagatcagtcaaaaggccagggtcaaaagcctcgctatctcgaagcgctaggaccaatttcttggtcccctttctctgcacatagtcgtgaagaagatctagatcgtaaccgagaagtcgagggccctggtgaatggttagtacaataatgcgatgtttttgattcgacatacagcacgatctgtaaggaacttttgatatccatcattgccatcggtgtttgtaaccgcagctcggatgatgttcttcaacgttgttttcagattgggagcatcgcctgattccaataccacgacgctgccttcttcggtcgatatcaattgaccattaagccgtgatagcaatctgctaagcgaggaaacatttgatccaactgtcaccaaagctgtaggaatacatccatcacatctaaaaccctagttagagcacgttcgtggatcgcatcgggatagggacgtacgtctgaggtgaggtgtttctgacaaaggacaacacatccgccaaaactgctgaatcgacatcctcgaggatattctaaactcccggtgagcaatatatcactatcggtcttaattaatttgcccgactgacctggatcttgttttcttgctttgaccaaagctcctgatacgtatcatatcgcaattggacggactcggcgttctcgtctccgtttaaaaggggcacaaagcgctgttgatcagcctggtcatctcttccggtagttgacgagactttgcggcgctttgaaggtcgttcgcctgctgattttccgtgtttgggtggttggtagatgtacgaaccctgggatgatttgtgagcgcgcaatcccaagaataccatgccagatccgaaaacaaaccaggttttggggcttgtcatttgacaagcctaaggcatcgttcaatccatcagcatccatactgctgctcgaaagggcttggttgtcgcaatggggatgacttcaagggcggaagcgcgacaaacgctaaacctaattaggcgataattggttctcttccgaacttgaacttcttcacttctccaacttttctggtcgcattcgatgaccgattgacttcagacttcagacttcatgctgcgccaggctattcaaggagcccgatggtgtcagcatgtggcccgcagcccatcgacacgcgctccacgccggaccttctccgccgtagctccgcggcgtcttaattttggcggaccgaacgacaaagtcacattctacgaacaagaatcccccgaaagcaaaacacgtcgaaaaatcgaccccgaagccgaacagaatgaggaacgagatgaggtcaaaaaggagctcgctaagatccaggatgaattgaaggtcttggaggagggaccttttgctcccaacagccctttcatcaagagtttgccagaaaaggaaaggaagattgctctagaagctctgaaaaaatatgacgaggaaaatcccgagccagcagaagaggccgggttggagcaagtttttgacaaagagcttgatgatatgctacgagaggagtttgaaggcctcgcgatggaagaagagaactgggaggatggcgtcaaaaatcggcgaaaaatagctgccagacgatctgccgcagcaaagcgtgcaggagcagaagctcatccttacgttataaagttcaataattctctacgactactccaagaaaagatgtcagacgagcgggctcgacaggacttatggaagtggtaccgacgatgcaagcagaccatcccagggtttttgacaataatgcctgagagggcactcgaaacaatatgggattcacaagcaataggagagtctgaccaggctacacgctcaaaacatttgcaaatcctggccaaggacgctacatctatcggccaagaactggctacgcctcagatcctgttttatattacatctctgcataaaagtggctccaccagccttgcactagagcaatgggaggcatatcaagcggagttgtctcagaagaaggaggatctggaagagtactggaagctcggagtgcgattatttgctgcagataacaacccacaacgagctcaagatattgctttggctttcctggcaaacgaccgaactcgtcagccgcgtgtactcattcctgtcatcacagcatggggaaggctgcccggaaaggaagctgaggtaaaggcttgggcactttatctgcggctgaagacattcctgggctctgatatgaccatggaagactatgatgaaatcagcattgctcttctcacggctggtcgattggatactgctgttgcaatcttcaaggatatgatggtgacaggaaaagacccggccaatgactcaactgctttgtacaaagccgcattgggcctggcgggtaaccttcatgcatcgagcatcaatgaaaatgaagtaaacaaggtctctttgtcggcactcaaggtgttacctcgccagttccaaaaccggttcttctatgcaagttggatgaaaaagctcattggtatgggtgaggtcgactctgctgctctggtgattgaacttatgtatgagcgatgtgtcaagcctgatagcaagcacttgaacggaatcattgccggctggctccgtgatgggaacacgagtgcacgcgacaaggcagagcgacttgggtgggccatgattcagaagcgtatcgatgttgtatggagacgatacctaccagccgagagttccccccggcttcaagtcaagtatgaggagacagaatctgtacgcatgcctcggtttatgcagagagaggtcccacctgcgagcatcgagaccttctctatccttcttcttcattacacacgccgaggcgacgacgacatggtcaaatacttggtcaagtctcttagtgatgcacacatcaagccgaactcttacttcatgaaccaccttctatacgcagagctccgaaagcaagacgtgaaaaaactctggaccaagttccaaacaatgtctaccgccatccggcccgacgtggaaacatatgcctgcctctgggactgtgccaagctccaatacgaccgtggacgtactgctttcgatgcggacttcccatcagcacgccaactctatgccaatatgatgtcctggtactcccaattatctcctcgcactcagaaaaccacccgagcgcagattcctagagctctatttgatcagattgtgcgatgtttctgtctctctaaagacgtccccggcacattagtggtcatacactcgatgcattcagccttcggcttcgcacctgatgacaccaccgcgcgcatgatagtacttcaaattgcgcgactggctggtgtaccagctgacactcccaaacggcgcctccgccgcttgtcttcgacgccacgaagcaaagaaaatatcagccaggttagccgtttgctcgaactgttgggtaaccgcaaagccgaaaacctgcgattgcaaggattgagtcttgagcagctagatccacgtgagatggaacaataccaactagagatcatggcaagtctactacggatcgtgatgagccgagcagatgccttggacccagttcaagtcgaaaataaactcgagatagcggcgaaggagatgttggccgaacatatcgatctggggctgcccttaggggtagaggatagcaagcttttgtgacaatgtcagtagcctatcctttttggcttatccattgcattggatttactgagaaatcaaggcgtttgacggtttgttttgctcttagattagggctgtatattattttgtacttagacataatgtacttatatcgctgaggtctaccatctttcctctgctcctctccacaaatgattttccttttccttctctctctttcttgctagctcagctcacttgatggagtttttgccttttcgccttctctagaaactttttaacactcggcaattgtcgcaccaactgtcctaccaaagtcttgaaattgactctgatatatctcctgcttgctattgattatctccatgcagaagctggtattatccacgccggtatgatatttctagacccattttcacttcttattcgtcctcctaacgcgttccctctagacatacaagaaaaaaacattatgctcgggattgaagatccttcaatcttagctgatttcgaagaggcggagaaatccaatcctagtccccgggagatcattgaagatcgagtgatttatttatctcacaagctcaagaaaacaaaccagcatgaccgacctgttttatgcgactttagccaggctcctttggatcagcccgttactcaggtgatataaaaccatatatataccaggcccccgaagttttactacgaatgtcttgggatcaaagggttgatatttggaatatcggggttgtagtaaggagggcatattttggtgtacttaccaatcctctaactgtcaacaatctaattacctcaggtctaggacttttccaaaaaggacatctattttacgctcgagattcacagaagcaagattcggacgctaatcatatcgctgagatgattgcgcttcttggaccaccgccaagagagatgatacagaacagtgactatgctacagacttctttgatattgaaggtacgtcactagaataatacaggcctctagggctcccggtcctgactgaagatcaaggcagttggaagggcaccgttccaatttcccttaagaactttggagcaccttgagggaaatctagaaggtgaacagcagcaactctttcttaaattcatgcgcaagatgcttcggtggcgactagaggaaagatgttccgcaagagatttattgtcagatcagtggctaaggtcgctataattagtcttaatagccccgttcgttgtatatttgaccggaacaggagtactttgataggttttctaagtcttcagcctcaccaataactggtatactaaaaatgtaatttctcttgtgaaaccgtagtccaaaaacctctaacaagagtgtattttgaaccaaaaagtacaataacaggaaaaacgactcatatctattttttgcccttgcccttcttcttctttgcgcttgccggagaagcaggcgtactcgaggtttccgcctccacaagaacagcatcgtcatcactgccctgaatagaggcaccggcggcaggggccgtagatgcggcctcagaggacttggttgtgatgttggtagtcttagcctcgtcagtagatgctactgagccctcattcaactccttcatgaatccctcttggatactcgtcttcttcttgatccaccactggcgctcctcttccaattttttctgttgatcgtccatgcgcttgcggtaaatatcgttattcatcatttcgttggcggactggaagatagtctggccccagccggggacataggcgtttgcctgtttgattttgtttagtaaagcacaaaacatatacaaccatttgttcgccgagaagaaaaaatgtttcttggcgacagagaacggagtttgcttatcatacctctgaaaccacatccttgacctcatcttccatctccttctccgcgcgctggaatcgctgccagagatcatcgccgacactaccacgttggacgagcgttgtgagagcttgcttctgggtgcgcagtgccataatgcgacggatgtcttcagctgcgcgacggagaagagaagccttgaagatagagtcagggatagcgggggccttcttctcttttgtggaagttgttgagggttcaaggtggaggagagagaagtagatatcacgctggaggtgggcagggaaccatggctctagagatgctgccttgtctataaattattcacaaatcatatattagccttggggacaattggacacgtcggcgcacgagatggtcggagaggctgagaggttgaggctttctaggggtatttcacatacgggacttgcgcttgcggtagagggaggagaatgtggcaagcgatcccaagagaatgcctaggtaggcgactgggacggcgagactgagccagtccacgtcgaacattgcgacgatgtggtttttcgggcaggggtatatggagagatcggaggtccgggaaagaaaatgaaataaagatggtcaagctgtcattcccaagtgtgaaggtgaaatcaagaaaagaaagggccttgaagtgcaaatgtggtggtcaacaagctcgaaaggccagggtgtttagtgggtcacgtcacatgttcactccttcgaacctacttccatgatagttataactagttcgggctgattatagatgtagatgtacaacttactacatatgtggctagagtggttcaggctgcgtttttttactatagcgatactataataaatgacactcataacgaaagattcgtgccaggagagacttgtgatattaaattctatgtaggcttccgcaaagcccaactttgggcctggatgccgggcctaaagtctaacccccggcctatcgtaggcctattaggcccccattaggcccctacgaaagcctattcttatcttaaatgttatacttgtgtagtatctataaagtctgggaacaatgccacccggtcatactttcaaatgaactagaaagaggtcagaaacagtttaaaaaaaaacatgaagagggcgtttcgtgggctgggcgcaaaaagagtatagatatactagttatgttacaagcacggagttacataatacaccccagtaatgatatttgaactccaattccatacaaatagacgaaatagtagacagacatcacggaactggtgtgggagcgattctgacctcaacggcgccgtcatctggcagaagtaggtcgtcccctgccgctggttccctccggtcaacataccgaagaccattccatccactcttgctatccaagcaccatagtctccggcttctgcgaaatgttgtgggttcctaactcgggacattccgagccaattgatgacaaaatggtacccatgtccctgtttacttttgagccgatcaagctcgacagattccaagctgtaaagcacagaagatgttagaccagtagatcgcccggacttggaaagtcccaacccgtcgtgggtatcgaggattaaaccactatgatatggacgatcgatcatgtcgctgctattgttattgctgtaccggaacccctaaagctcatgaattagcctgagaaaagacatagataacatcgaacttgatatgttgccagagacctcatcagcatgcatttttcggtggattctattgctcgacatttcaatcagagcccagtcagcggccactcgacgcttgtcctcattgagtcggatgcgatacataccacttccggcgacgacatgtcctaggtagtatgctccattctggcattttcgcatatgaatcccggttcttttcaaggtgttaaatatcccgcagcgtagcctcgtacgcacgcctggcagaatccggtaaccagcaaccttcccctttgtccatctcggccttcgaggtatagaaagaagcatctttcacatcttcaatggacgaatttagcgcttttatcatggtcctgagatctcgagatgctgggtggtcgattcggagaatgcgcttggcgatatcaaggaaaaaattgttgttgtgcataccagtccaagccaacccaaaggcctccagcgcggagtgttgactttagaacccccattttatcgatgataacgggaccattgaacggtgaaaaggtggatgattttgagcagaagtccattgaatgagcgcttacttgcgagaaggaagatatggttgcaactgacgacatgatgaaaatgaccacgatatcagtcgagggaggagggttgggaagcggaaggttccgatccgaaattagcataaataaagtataactagttcgaggagcggtcttatctataacgatctaagtgtcctaccgtatctgtactttctacttataaagagaatcaccatttatatggtttacagaaagtcctcgtactagacgagtagaacccgtaggtagtttttcttttcctttctcctgggtatttattatctaatgactgctctaaaaactgttctaaaaatggtatagatactaaagagcgattccttctataactagaaagtacggacagagtaggtacgatagaggtataaatacctcctagattgtgaggtactagaagaaagagtacatttaactaataacaaagataaagaaaaaaagaagaagtaagttgcaaagtgggaagcagctactagttaatatagctgactactttataaacgttgcaaactttgtatcgttgtctgaagtacaacatttacaacagtgtacctattattccttcaaatatatatctcgttgtactccggaatatgaagtagggatttgggatatatcaaatcaaggctagctatgcaaagcgccccccccttccctattactggcttattggctcacttctagcctacaacacaacaagttggatgatttcactcaagtggtagaaagttaccgcttggagatcttttctgtggaaaaacgtgctccgtagtttccgcctgtaacgctgttggcgccattgatcccaagtccaacggcgtttggaaagccaacaatggatttcaacacttgtcaccgcattctttcctacgcatttgagtccataagaaaacaaccggcacgtggcatgtacacgaggttatgcttcgcttcgctccggccattctcaatacgacctataagagctacaattacgaagagaaaccacgttttgaaccattattttcatagtctacatgtttcccatgtgaaataacacgctgaaactaatttttgcgtaaacaatgagagagattgggcaattcacacatttgctccccatccaccacaaaggaaaaaaaaaaaaaaagaaaaaccatcgccagatcagaggggaatatgaaccgagtcaacatattgacaaagtaagaaaaaggacaaaaaagaaaagggtgaaagtatggagtctctatcagacatcactaaaactcaggttggccaagatatccttggtctgttggctgataggtccgatctcctgcatcgcctgcatgtcttccaggactgtattgtatgttttgccgagaccatcggcgacgcgagtacggttccattctccacgcatatgccacacatagtccattagattggtgttgatttgctccagctgctccactgagaatccgctagttgacagggttagctgcgtgtgcagacgctcaacaacttcaagatcaagaacgaatggttcatggggttcttcgttcaggatcaattgcaagctagccgaagcattggttgctggcatgttggatgcatcgaacagcgggggttgcggtttcgactgcgactggcttccattcaacccgctattctcttgggtatctgcattgctaagcagcgagtcccgggggtggggagaaggctggctgctgtcattttgctgggtgtcgggcagatggtcttcctgtgacacgcgatcggggtatggagtaagatcggggtattcggttcttgagacatgagggctctgagtgtggtagttttgattcgacagatgctcagaggatttcttatcagaagtcgtctgggtggtggatgcttcattagtgtaatcagctggctgggatccgggggccattggagtcatggggcctcgctgagagaagctggaaagaccagattctcgacggatctgctgagaaggcgcagtgtgggaataagggggcttgggctgtgctgatggcccaaacgagcttccctgggtatccttgctacccgagtggtcatcagaattggacatgaaaatgtcgccgtctccatctccatgggtaccattgctcgcgccgacagcatgggaaccaaactcgttgagatccgaaccatcgccgtgatgacttccatttgcgaaactcttggacgggggtgcgggcgtaacagggcgcgaagtcgctttcccaacatcctcattgtccccgacgggttgaattgggccagtcgataggctggattcagtcgtgccgtgcgacacaataataggctcaggaatggggggaggggcattctccatctgagcacgtttgccacgctccgcggcctccttttcacgagccatctcacgcaggtagacctgctcacattctgccataagagctggttcggctaccataacactagcgatatcaacttcgacattagtcaaaagttcacttgaccgcaagatgcgttccgggtcaccagtctgtcgagcatctttgaccattcgcttgatatccgccacaaagtcgacggcgcgtttgtagtatccgtttgcaaggcgtttttcaattgtcacaatctctaggttgtagtagaacttcccagtggcagtttcacggagacccaacacaccatgcttgtcatatgccttctcataaggccgaaaggtatcttgctgatccggtggaagatcactggtaacaatgttgggattttcttcctcccacaagtatcggatttgggattcatcgatcacgcccgacctaaaacgcttgtacctcttgacttgatccataataggctgaattcgagttttcagaagattcaaggatatgtaatctttcttcctctgagccttgatctcctccttggtgagttctgcctcgggcttgggaggcggaggtggcgcgatttccaatttctccagctgacgaagtttgcggttttctggattcgggaagcccttcggaggtgtcttgacgaattcaatgatttttccaaagaattcacgacgcgcatcatgagttggagcagatagatcatacaggttcttctttgaaaacccgaacatgctctttattagactatcatccacttcctcttcttgtgattcaagaatgccaagcaaaagaactgggtcagaaggcggcaccgaccgcaaaagactcatgaaagtagaaatcacagtaggtccgacagtctggaaccacagttgaatattgggaatgtaaatcacactcggcttgtgtcgcttgacctccgtgaatagctggatgacagctgcctcgggagagcgggttgagtcactcagcaaggttgggagatcgaaggcctgtacatgcaggccctcaaacacatgcagcagcgcggcggcgaggtattgctggcccattccgtgagggcctcgaaggaggagtcggggtcggaagacacgcgagcgatcaaactcctgaagaaggagctcgcgggtgaagcctgcaccatcatcaggctcctcatattgagcctcctcgagagcagtaagcttctttcgctgtggaagtatctcggagagcaaagacttgatttcaaataatggacgacgaagcaggggttcaatgcttggggggagggcactcgcaccagatgaggtagaccgctctgaagagggcaccatcttcttgattgctagcatgaaatctttgggggcgacatcgattgttttcggatcaatcacgagctttttgtctgatttgtagatttgagggtatcttctttgtacagcattgattgcagcctcagtgcaaagggctcgtaagtcagccccgccataacccttggtcatatccgccagatcatctttgatattgcttggaaggggaggatcccattccttggtgtgaatgtcgagaatagcacggcgtgcttcgagattaggcagcgaaaaataaaattcacggtcaaaacgaccagggcggcgaagagcaggatcaacagagtcaggtcgattggtggcaccgatgacaaccacctgaccacgaccatccatgccatccatcaatgcaagtaaggtcgagacaatcgaggcatggatttgttcttgtttgctcgatctcacgggagccaaacctaatatagaatattagctattgtcaactatgctcagaatggcctctcttaccgtcaatctcatcaaagaagatgatactaggctggttcttgcgagcttcttcgaaaagaagccgaagttgtcgctcggcctcaccgacccatttgcttaatgcatccgcaccctttctcatgtaaaaagttaccttgcgtccttctgagctgacactgttggctagagcccgagccatgagcgtctttccggtaccaggaggaccgtggaatagaacaccgcgaggaggggtaattttgaaacgctggaatatttccgggtacagcagcggcaaagaaaccatttctttcaactggtcaatgtgcccttgcaaaccacccacatggtcaaagttgacattcatgtcaacccccaggggatccgcgtcagctaaagcttgcttgttattgaacttgccaaggtttgcaggcgtgccggatgaggtctgagcaggatcagccgactggttgtgggtggctgcaactccaacaccaggagcacgattcggctgtggggcaccttcgtcatcactgctatcgctgtctgcgcctccaactgcagtagggccaccaggaacaccgagaatcgctgaattaccaccgccaccgaatgggcctaatgtggagaacaaagtacgctgccagcctccacctccacgaccacgccgggatggagaccctgtcacttcatggtcagtgtcttcattaggttgaaacatttcaggtcgaatgatgcgataatcaacgtcctttcggttgcgacgcggtttctcatacacgaccgcttgcttcgcacggcgacgggcacggccagtaaggtcttccaattcttcggcgagttcctctgcctcctctgagggcgcacgggttcgagaaggccgttggcgtaggccaggacgccgactggcagagctatcctccgcttcctcgcgagcttgaatttctttacgaggagaggcacgcgattcagggtccgagtcttcctcttcatcattggatggctcctcctctggctcgaaatcactttcttcatttttgcttttccgctgtgagcttcgagacggctgcttacggctggaccgacgtaggtgcgattcttcatttgtcgccgcgccttgcgcggtattctcctcaagagattgctcgtggtggagcctgcctcgttgccgagttgttggaggttcatcagtctgctcggaatgatcattcttcgaatcgccattttctgattcaggaacaacatcttcatccggcattactttctcaattgggtcgtgatctccatcattcagtggcaatgtatcaccttcagcgccgccttgaggcacgtcactttccagtacctccatttgtgagccctgaatagttgtttcattgatgatttcctcagtgtcctcatcaccttcagcatcctcatctccttcggcgtcttcatcttcatcgtcttcatcaatgatcgtgcgcttggccatgcggccaactctggaaacacggcgagttggggatgggttttcggcttctggagtatgtgtacctcgctcaacagtgtgcatatgacgaccagagttggtaagggcgtagatatcctctgaggcgtcacgagtacggcgggttacacgtttagtgaaggccaagtaattgggcgggagtttcaacttgatgacggtgctcttgcgtggaggagaaggagtaggagctcgtgtctcactctcgccgtcatcattgagcaggtcttctcccgaatcaggttcctcatagcgcgggcgacggctctgggtggttcgtcgacgggccgttcctctgacattgcgttcgacttcttcctccgattcttcttccacctcgtcgaagtcaaaatcctcggacagttcttcctcgtccgaggtgagaccgtcgtctgagtcgcgccgtctcttttttgtggccggccgcgactttttcttggggctggccttcgacttccggccggtcgaacggggataacgagcatgatcactgtagtcctcgtcatcggagtcggactttatggcgacctcgtccagggtacgctttgcgccacgagccatggcgtagttttggtgattaggggatcactttgaaacacaacgtcagcatgcaacgctccaatttgggaagtacgatgaaaacacagtcaagagggtcaaatgcctagctgacaaggaagacgcaaagatgaaaaggcggatcgtcgacgttgcgcgatgcgggcagagggacaacacttacgaatggttcagttgtcgccagcaacagccagaccactcgatcaaagggaaagaatattcctgtcacagcagtaaccgtggcactttcttcccgacaattgctgatcaatatgttagcggagacggcacggtggtggagcgcaattggggcagagatggaagggtctcacggactcgggaacgcgtgggaaaacaaacgtgtcggaaagctgtcagccaccaggacaaatgcgcagtacacagaaataattgcagcaagtagaagaaagtagaagacgatgcgagatcgagggacgaagacttcagggaagaagggcggaaaggactcgcgctcattggggctgactgcctgaattcatcagccacttatcgtggcgcaccgattagtcaacaaagtgcacgtgccaccctctctcaatggggggaattgcttcaatagccattgtcacccttcagccgatgaatcaagcccccatgaatcgagctattgtagagctccattctcctcctgaatggactaaatggattctattaaccattttgatgccccaatacggcacattcaggattgatgaaggtgtgggggaatgacatgatacaatgatggcaggaggtgtcagagggcaatttggaacatgaaggagacgagaatagggccctttgttttttccttttcgttgtctttttctctgcgacgctttcgaccggacctgatatcatgtgccgctgactcagcagtggctcgtgcccctgcactagaagatcgacgtgcatcgacactcatcgacccattcaccaagccaattgagaatctattagtttctttctcgtgatatttgtttttcattgatatacctattgatgttattcatgtcgcactacagcgccgataaaagccctggagacttcaatatctaatcttaacaagtgacgagaccacttacattgccatcgcgacatcacagggaaatctttttatctggagggatagtaatttctaggatagcaatggatttagttgaccatgtgtgtatatctcaacagttgaatctccaaataagcaatagtgtcaaaagcatcacttcacgagtagccatctacttccttccgataatttccttccatttagccagctttgacgccaagtcgacctcctcaatcctctcctagactttccggtcccttataatgtaagcacgcgacattgagagaagataagcactatttgaatacttgagggccgctctcagagcatctctgatattcttcttctcttgtgcagtgagctcacatcctcggaagctcgagcagcatgcacacccagtagtgcagtgaccggctcccatacttttttcaggagtagactcgcgtttctcgcagcatccgcattcacgcccgcagcaaccacctctcccagcacaatccttgatcagttcattttgcatataccatttcggattctttcttaatgattcataggcaagtttcatagggccaccgggaatgctgctttgccacttgtgaagctcacactcctgataccagtattccttctggagcacctcttgcgttttatccagtttctcgagctgtacttcgtcttcaccggtacttttgcagtttttggagtgcccgaaccttttcttgcagcgcttccttctgctgagcaagttcacggacatggtaatcagcaatgatgagctgtacgaagagatcgagcccacaacgagcttttttatagccttttctatacagaaatttgtactctgtccatccaattcgtttgcgttcaatccgccaagtctctgttctgaagaccatattggaggacacaatttggagataaattagatatgaagggagttagctttcaaggcaaagggttaactctacattacatcattaggtagtcgagcgccgacacccaaaaagtcacctctatgtgatagtcgacaaatgctagaaaaaactgaactttgatagagaaaattggtcatgaatacatatactggaagagtcacccctgggtaatcaaagtactagccatttcaaccccatatatagcaaatccacgctagttaaatatatgtgctgcagtacttaccttttctgtcgattatttttggattgtatacccaacttaatcacgagaggaagagagacgaataaattgacacctgaggaagcaacgccaagaccgatatacccgaaataggatgcgaacttcaacatcaccctagctcgtcttctcggatatcaacaacgagaaagaaggcaacggcttattaagatcacaacatgttttcgcaaccagctcgtcggttggcaccggctgtgatgtctttccaatccgctcgagctcccatgagccgacgcaccttcacctccacacaagccacattcaactcatctcagaaaccaagtgcatacaaggaaggggtgtgtacatatttttcttccagaccgcagtatttaattgcaatcttctaactttgtgtgtctagatgaataaatatcgagcctttgctggtcccttcgccaagatcttcttggggggcgtgttcgtctaccaggtcctttattggacttggttaaaattggaaatggatgagattaaggtggcaaaaaatggtgagaacagcacaaattaatacattccattaccctatcttgcatgtcgctaacccttcctgcagaaaaagtggcggtgctagagaaagaagcccgggagatcactagcacccagaaatgaacacaatcttgagaagaatctcgagaaaacctgtaccatattatgcttcattgatgcctagcactatattatattgtggctgtgaataatgtcatggcacttccagacttggagatacattgtgatgatcccgatcaactaaacattgcagaatatccttattatattacggaaccaggattccaataactattcaaaaaccctagtatgtcatgccgcagcatatttgcgcttccgctcgcccgtcgttgtagcttttagactgtgatcaagcgtctgtaccacagcatccttggtctgatccatctcgtttccctcgagggacgaagacgggaaccgccagtcctggcccctctctcctttcttgaaatgctcaatatcaatatgattaaacctctcatccaaggcctcggggccatgggtctttagtgtgactctgtggttacagaatccacaccaaaaatctgactggccggccagatcgagccggtgattgccagcccaagctgcgacgtgatattcatgaattccatgctggcgcaggtggtgggtatatgtgtcgggtcgatagaacagccgctcgcacgaggcgcctgtttgcacatcggtttccgtgcagaaccaactgggcacaccgagatgctgggagctctcgtggcgcttccagtcggccttgctgccgaatgacttggcacagtgggggaatgtacagctgtagggtcgatcgtggcgcttctggtgctttctaatgatacccgtggttaatacactaataagaataagggtcaagggtgacttacttcatttcacagcgaagccgggtctgctttgggcacgcgtcacattggaaccacccacgtttttcgctatcaggaccttgggcggtggcttcgttttcgtcagataaccgttccaatgccaccgaaagcaacttctgtagcatttgccgctggggttgggagagctgagcagcgtcggtctcaagatcgattccctcatccatattctgacttgatctccgcccgcggctgtttatcatctttgtcatggcgttgattaagttatcagcggcgtctgcaaccgatccatcaggccttgcgatggcacgttcagtggacggatcttgactcgtttttgacagacccatggaaccaaaagcaggcgattgagaaggagtcgagtctgcgagagacggcgtaccatactgagggggtcttggtgtggcagcaccaaatgtgaagatatcagtcctttgttgagacatggaatcatattccggctcgagatcggttgactggacagacgcctcatcttcttccgcttctaataccgactcgtcccttgagctacgctcgtcgaagttctgttctggttggtggaggatgactgtctcgtaccaatccatggacctgttcattaattagtgcatggaacattagatgtctcacttgaaacccgctttttaaggagtgcctccccatcctcttctcgatgcattcggttcaagtgttgcttgaagttatccagacgcggccacctcttgttcgggcgcgggcagtttgtcccaaaacacatgtacatcatcttgggcccacgctcgggctccttattgtgaacgcattttttatgacgggccagatcattaatggtgccgaagccgtccttccgcgggcaatttggaacgtcacatttgaagagtttcttgtggcgagcctcgtgtttcctgtggaagttagtcccctgccatcactattctcaaatcgcggctagaacgatataccttttgtccgaaggacatttcccaacccacttgcacgatggatgatcgcatcgcatcgaggtatccaccaactgcgacggcgagcccataaactccgatgtgtacgatgacccagacacagatccatacttggaatgaccaaacaaaggccccgactccgtaggcatattctctgtcatctcgacgtgcgggctcgagtccacgctgtacgaagaagcaacaacagattgcgttgcacagctggtcccaccgtacccggaatcagcggaatgatagctatctatatactggctcccgttctcagatggctcgctatagtgatgttgcgagaggcagcagtcctggtcgggcatctgaacagacatgttcaagtgcgagatggatgaggcagccgggacaccggtggccagtagcggattccaggcatcttggtcgcctatcagacgggagtgagcgtactgggagtagtataggtcactggggtgtgaaggccactggcttaagagtgggtggttaactgttggatcgagcgatccgagttggaggtctagtagtgggtttgcggcatcgaaggggatattcgagggtctaaaatcggacagatcatgtccttcgtgtccaaccatgatgccttgaaggatgtctgtggagtcattccagtccagctgtgtctgttagggtggagttagattatgattcgtgtggagagtcgtatagagttaacagggcacgaacctccatgactatctaataatgtctttaatataaagaagatgataaatttcgtgaagtcgagagagaataagcacccagtcaaatgggaggggcacagtattaaaaggctcgcgatgcatgcaaatgccaaaaccctacacgcgagagacacgcaagctccacacgacccgagccggttgacttcaccacgcgatagccgattcaagggttggaatgtgttaagcgaacatgattaggaatatgctcaataaaatatacacaaaaaaggaagaaaaagaagaaaaaagcaaaacagaaacccgggaggtaaaagctaagacaaagttcaccctcgcgtgttgccagcgtggaatgcaacatgtcatcccttgattacacagcccgcccctttacccgggtaaatattaatttgtaggttattccataaactgtggtgatattttccacatcaaaaatatgaggctgatagttaaaatccaataccggactaagatcacctcaaccctggtctcccgaggttgtccggttcacgatcggctgccgaacactctcacctcccagggttgattcagcccgcttctaacataatcgcagaacatccatagtttacacgtatcacacacccacgcacacagaaaatgtcgttagtccccctgcacgaggcatgcaagacaactccagccccccatgaagatctcacgataagtctccaaaggggaggaggctgctgtagggaagcaaggaccggattgggctgtgacaggacagacgatcaacaaggctgatcgacgccgatgctcgcttgccatgttcgtgcaagggataaataagataaatgcgcacgtttatacgcgatacatgtgtattttcgcatccaggagtcaaggagattaactctgaaacgagaattggagcactatctgaatttagcctgatctttactccgtgctccgtgctcggtactaaatctcggattaccattgatgatctccagaggtactttatgttcttatgaaccatggaaccatgccccaagtgggaacagcctagtacaaaagaggaaaagccaaaacataaatctgatctctcatatgccatgcgctgtttggtctgaaacgaaattcctgagcgcccgaaatatgtacagagatattgcgagcacgtgttaaaggaaagaaagcatgttagttaaatcatcatacatagtcatcattccagaaatacatgagatcgggaccagctctcccgatgctcgggaaaaaggcacaaaaattccttctagtaatcactaacacggtgaagatgacgtagaacaattgacagcaaaacggagagggggaataagaatacaaaaagaagggggcattgtatctataatcacattcgagagggacatcccgaagagtacgtcgcaggactgtaggggctgttggactccatgggttggtaagttgagtaagtaccatcggtggggtacatagagggataagggagatactgggttagaggatacgagtgctgcggcatgagatccgcccccggagatctcgatctcgggacggcgttataaggcggtgggtacgtcactgagttctgatgtaggggataggcctgggcctgagcgggacggagtgtggtttggtcaaattggcccgtcgtgtgcgtgtagcctgggaactgatcaggggtatgagagtctatcatggactccggctccatggaaagttcgcccccggagatggtgggataatttgccagaggtacggcgttgattgaaaacccaggattagccggtgtgctagtgtttcggatcgcgtactgcggctgcagataggtggaggctgtttcgggtagttcgtgtccagggtgatatggcgcggccgatgattcccgaatctgccccactttgctggggttggtggcaagggttgaagcgttgctcggcttcgctaatcgcaaaacgggcaaggcgagttgctccaggtgtttgccaaggtggactgacaactttctccactcgctacacacattcccgcagaagcggcatggctcttcctgcggggcttgcgtggtttcatgccgacacttttcgaccatttgccataatcggtcaagctcctgctcttttcgactatttggcacactctcggcatccacggtgctagaggctttctccgtccttttgatcctgggctctggcattttgtgttcccggaccaaatgctgaacgaaattgtccttacggtaacatttgtggttgcactcaggcaatacacatgtccaccattccaggtgccggtgcttctcgttctcatggcgaacccagtctgctttacgcttgaatgccttgggctcggtacagtgggggaatgtgcaaataaatggctgcacatcttcgtgaacgtgtttagaccagtcggatggtttttggaaggttttcacttcgaagcaaatggggcactcaaaccgggcaggaagacgactgactggtggaaggggcacgccaggagggaaatgtgtcgcagccgccgtcccatcacctggagaatactgttgctcgtactcataactgaaatttgtcacttgggactggatctgtcctgcctccggatcgttgggggcctcgagatcctgcaacaaagtgggtttccctgcctgaatagtacaaagggtgcctgatttgcacgtgtggttggcagctgcaatggaatgcttctgctgcaaatcaaccaagatcttgtatcggcggacttgctcatgtgctaagcggtgaatcaaagccggctcaagccttggattcaactgcatgatctgcgatttgaacccttcgattgtcggcactgggagactttggacagcgggaaaatccatagctacgcctttgttattgctggcgtgtgtatcattctcatcagcacctccattttcagggcccagaaatgtacttttaggtatttggtaggcgtccgaactgacatggggtgatgtgatgcttggaactggtggtccaccatgagctgtcatgagatttattagcccagggctacttggtcgggggacctcgctcctgcttcgacctcgacccttgaattggatatttaaagaacctctctccgtattcggtgagggtgcaggcgacactgcttgcccgacagcggccatttggctggtcattgaaagaagtgcgttgctcaaacttggcgctcgcgaatgacgacggtgcaagaacccattccgtggtgaataactcgtttttgccggcaagtcctctgtatcacgctgcggaaccccggggtagctattcgattgaccgatagaaagttcagatgcttggcgcttcagaatcgatgatgcctgcagaaattgacgcttcaacagactggtgcgtttcttgggtagttcggtaatggaaaagttttcgagagatgcaccaacattgataatgctattgttatcaattgttgcttcgagcgatgcagtttcgaggtcccgcacacgtctgttaaaagctatcatagcgtctgtggagctatctggctgcatcgcttgtaatctgggtgtcaaatcgcgagggggatcgtgccaggggtaaatatgaatgctttcgtcatctttagtcggcgagaaagatgaatagacctcgggggtgctgcgatcatatctaccagattcatcaacctcggctgagggctcctcggagtagatgtcaacgcttgcttcatcttcgctgaggtcgtcgctgctttcatgaactaataccccgggcccaggaaatgatgtgtcttcggtgcgacatttgaggttgaaataatcttcttgtttcaacggatgatcaccggtactcctcgctcgaagtctcctggaaacaaggtgtgggcgtggacgcggtgaactaggtgagtccccaccggcgtcgctgttggctgcgctcacagagacagaccaatgagaaatatccacatttttctcgctcctttctcgctgaatatagacgtcattgggacttggcacgaattcatccccacgggacgttgggtcaatgccagctagatgcgttgatgggtttagaatccatccgccattctcagatcgcttcacgggaacagaaaataccgagtgacgatcgctatcatcttcgtcttctaggtcgcttgaattagcagatagatgtgcaaaggactggctgagatgtctttggggtgatgtgctgcgttcctcgggcgaatcccctcgggtgaaggttgtaatcttaacgatggggcttcttcccctggttgcacccgaagcctgctcagtggtcaactcattggtcaagacaccgagtctcggcggctcagcacctgcgttaaagacaccgaggccagactggcacgaggtggggattgattgccgtgccctagaattgccaggaggctctggacccgccagcgtgggtgatggattcggattctggttgtggtccaatcccgtccactgaaagctcggcgccatggaagaaccccataccgcatcgacaggcatattttcctccccaatcctgtacgatggcaggttttcattttgccatatcgaaccactagccagttcgatatccttcggttccacgaatacacttgtatcagaaataggggaggtgcaagtgcttgggtccgtataatcatttgctctcgggtccaaatagccctgggttgtggagtcgatcggagtttcctcatgagggggtcccgcacggtatccaggactcccccgcgttggcgttagtcgaatggcactggcctgaaagaagatttcctcgggatcagatggggctgataggtaaggatccggagcatatcgatcttgggttgcatctgctggcgattgcccctgggcgctgagtggggaggcgtgcgacatattgaaatgaaatggcggtcaattagccaaagattgaccgcgagaacgggcatcaaattaagccgaattagaaagcatcgagtagatatcgtcgtatagattataaaagcagatttgcgattatattggagttgtgtgtggtgtttggtgtttggtgtgatgatctggcgttctggtgtggtttgacgcccccaatatataagggaatgaagggacagacgaggccgcaaatagttcaggttgaagttgaagttgaaaatcagagattaaagagtaaatgaaagaggaagataaaaaaagaaaaagcagaagctatgggggccgaagattagtcggagatgaggggaacagctgaacaagcgccgggcgcatccctccacttctgattcaatacaagactaagaagaataacaccaataagatcaactatcaaatgtcgacctggtaatgccggactgtcagccttgttcaaagaagaaacaggaatcaaaatgctccgctttttcacggagcctcactagggaacgaccctgtggctgtgcaagttgcattctctctttacatcattacctatggagtagtattatatgaagcattatatgaactatcgatattgggtacttcgtatgcttgtatataggcgcctcagccacagcattatcctgctctggccgtgtccatagggctaaatttattggaacacacggctgaatacaatgaaccttttaccgttggtcagaaattgctcaagatgaaaccggtttatgcagtattcacattcccaggttctatctatatatctgaccaatgtcaatagtaatgatggtcccttctctacgcgcccactaatgtaattatagactacagcgcttatgagatttccataacaaacctgtcaagatagaatttgaatcctacctagttgcaagcaaacccgcaaggatcttcaatcttcatattcctgctaagatttcgctgaatttgtagggttgatgccttgatatgcaggctatatgcggtgaagaggtagtccggctaactttggcagaataacccaaccggcagaataagtaaactagaaaattgatgtaactacagtgtagtgatggaatgatagagggagagagttgtctattcctaaaggggcagaatgcccaactatctagttgtgggggttggtgcctgccgcaccgagctgatggtcaggtgaccacgatgtccaacaagaatgaaccatcattatcttccccagagcttctacagtcacactttacatagcattaaaagttagaatcagtcgttttgctctaaaacggctatcgggcggccgcagaccatccagatccctcgtaggtatactgttgtaaatgttgtactccagacaatgatgaaaggtttgcaacgtttgtaaagtagtcagctatatcaactagcagctgcttcatactttacaatttgcttcttccttttttcttaatcttcgatattggttgaatatattatttcttctggcacctcacaatctaggaggtatatatacctctattgtacctaccctatccgtactttctagttatagaaggaatcgctctttattatctataccgtttttggaataatttttggaacaatttttgagtagttattagagcagttattagataataagtaccggggagaaaggaaaaggaaaactacttacgggttctgctcgcctgctataaggactttctgtaaaccatataaatggtgattccctttataagtagcaagtgcagatgcggtaggacactcagatcgttatatataagaccgctgctcgaactggttatactttattcatgttaatttcggatcggaaccttccgcttcctaaccctatttctatctagcttgccctcgactgatatcgtggtcattttcatcatattgtcagttgcaaccatatcttccttctcgcaagtgagcgctcattcaatgggctcctgctcaacatcatccaccttttctccgttcgatggtcctattatcatcgataaaatggggatggcaatatcactagaggaattctgaatcctccttctatagcgatttgcctctctccatttgatgcacctcagaccccacaattcgctgtccacgcggttgagtacctctccaccgacctacaccttcatcaagtacttctcctacgacccacctttcaacctgtttcccacaaccagcttggcggagcctaagctcttgtagctcgtcctaattattaccggcaaatctaatttcgcctcgtggttcacatcattacactcccgacaacgtcctttgcgacgccaatttgactgccaaatccggcaacgctcccactgagccaaggcatttttgtatctagaatatgaggaaccgtgggattgatgccgaaatgaccgctactgagaccgaaaacggttgcctttccacttgtatgtttagacgtccagccgcttcctaaccgcccactgccctacaataccactattctgcatcctaaaggggctttatgagaaggaccagtcagttatagacacattctttattcagcgacacacactccccgctagctacttcgggtatagtatccacctccggctgtccaggtttgatgcgttattcgcttttaatctacgtaacaacgatctccttttgattttaaaggcatcattttcgggactaatcgtgccaagctattgacaatcgtgccaaggtgtcagcaacttggcattcgaagtctaagacatccgttgtatgttgtagtccatactccgtaccgttgacgccaagatcattcccgagataagataggcgttcgataacgagcctaagccctagagggttgtaagatccggggtcaacacgagaacaagacgtaattggatggctgaaattctatggaacacatgctctcggatccttatcttagcttagatcgaatcaagtccccttcttatcatgaataattcatccgacagtcacagattcccatgaactataggcgactactatagattcaaagctccccgttgaaacaatagtcttggctgctgtcatagaatagataagatgcccgaaaatctttgttttagctattatgagctatgtagatgtccactctgctagagaatatatatgtactgtggacccccgagcagaggagttaggattgcgatcccattctagttctcatcatggccgactctgtaagtctagtatgatggaaatgacacttgcacacagctgacacagtcatataatatagccagtctacaatgcatctaccccaacaggcggagatccactcaaggtcgatgtaaatgctcaatatgcaggcgtcgagtggaactatacctacatcatcctctgctcgttcattgtttggttgatcatccccgggattggtcttctctacagtggtcttgcacggagaaaatcagcactggcattactcttccagtcgttcatgattgcggccgtgtacgttaaggtcttcttcaaaatccacgcgtacatcgtactgacaccatatatcccgccaggataacgttccaatggatgttctggggttactcgttagcctatgcccgggatgcaagtcccttcattggaacccttaagaacttcggtctgagaggtgtgatggtagcaccatcgcctggctcggcggatctcccggagattgtgttctgcttttatcagcttctattctgcgcatgcacggtaagcaacacataaaacagaatgtcgcgagactggatctaatggaatgctgcggtaggtcatgatcgttgttggcggagctttcgaacgaggcaacatgatcccctcgctgatcttcggcttctgctgggcaaccgtcgtctactgtcccctagcctgttggacctggaacagcaacgggtggctgtataacctcccatcacttgatttcgccggcggcggcccggttcacatcgcatctggctggtcagcattggcttatgcctttgttttggggaagcgcaaggatatcgacaagccttcacatgcgaaaccccacaacaccaccttagtcttcttaggcacgtccttgatctggtttggatggttcgggttcaacgtatgtcacacctgtgccttttctaaactcaagtctgacagcagagatttcttagggcggctcgactctaaatgctagcatgcgggcaatgctagcggtatttaacaccaacactgcggcttgcacaggcgtactcggatgggtgctggttgactatattaagtatcgtgggaagttttcggtcgtgggggcatgcgaaggcgcaatcgcagggctagtaggcatcacgccagccgccggatttgtgtccgtgtggcttgctgccgtcatcgggttcctcacgagcatcgtctgcgcgctcctccaaaacatcaatgagtggttacacatagacgaggggatggatgtgttcaagctgcacggtatcggcggaatggtgggggcattccttaccggcatctttgcgtcgcaatctattgccgcgttggatggcgtgaccgaggccactggtggcattaacggcaatggagtgcaggttggaaaacaattggccgaggtgtgtgctatctcggcatattcttttgttgtctcctgtatcctgctttacattatcaatttcataccggggatgcagttgcgcgtgcatgaggaggtggaaatggttggcctggaccgcacgcagtttatcgatgagcagattggtgagcgggcgctgcttgacgatctatgcgggtcttcatcacctgcaagtgtgcttaatgggcagcttcctgtagtggttgggtctgagggaacgaaggaatgaccgggttagagtctcgtctcgtgacttcaaatcccagaattgtatgtcgaacatgtaacttgtctcagatattaacttcgatgtttctatttttattttttatttgccatctcgcttctatgtataatgttttagcgagagatgcccaagaagaaagcttgtgactttcagtgtgtgactgaatttgtttgtttatttgtttgttttgttttgttttgtttttttttttttttacgaggattctaccatacagtaacaggggaataggaaaagccttcgccaagacagacccttgttcattagagtgacgcaacgaatctccccatcggcttccaaggccggggaagggaggggctgacgtatactttcccctctccccggcattttagtgtcctgtagggtccttttcccaagctgcattccatgacgacgaggctgggatacatatccgcttacaatgtatcgactaccccgtacctacagagtactatagttaataaatagtgaagttgagatagtcaaggcccaagtggaactgtccctgtcaagattaaaacaacgtgattagtctgcatgccgcagtgagatgtgtacacatctgcaggagaaactaagtctgtagtacattcgagattgtacgttggagacattggatgttattcccatcaaatgattgaaaatctgcaggaaaaaaaaagaaaaaaaaaagattacccggtcacagaaacttaaattacccataaattaccccacttttcccaattcggaccaatctgtgcccattttgccactgaaaattccgagtccggcccgtcatgtttcgtaccgctccggagtcgtcgcgtccaggccgcttttggcactctccttatctttcttggccttccaaggttggctgtctctctcctcactctactcttcactctcaagtcttctttactttccgtcattcgtttaccccatattcttgcaacctaatttgacaaattgatcctctgcttcattttgagcagtcttgtcatgctctgcgaataatcaaaagtccaaatgggcaaatgtatgcagtcctaccctaactttcatgatgcggcaaattgacctttctattagggcgttatggtgtcgtcctagacgcaggatcgtctgtatgtcgactcatcccggagactcggagtcatgccactaatcaactgcacaggggactcgcgtacacgtttaccgatggctacgaaattccgcggcacgaaagaacgctcatgtggaggacttgaaatcgctaccggaaatcaaaactaaagaagaatggacgaagaagattcacccaggtgagcgctgctcaagccaatacggattcgtcgacaacatactaacctatctgcgcaaaaggtgtttcttcattcgccaacacacccgaattggttggatcagaccatcttgctcaattattagaccacgccaaggggatcattcccgcggaagatgccaaggacactcccatattcctccttgccactgcaggtatgcgactgctaggaaatctcgagcgacaattgcttctggaccagatctgttcttatgctcgtgacaactcaaactttttacttccggactgtggggttcacatccaggtgattccgggcgtgaccgagggactatacggatggattgcgacaaactacctgatgggatcctttgatgccccggagaaacacgaccatggaaagggacacagcacctacggattcctcgatatgggtggcgcatcagcccaaattgcgttcgccccgaatgttacggagacagagaagcacgccgaggacctcaaattattgcgattgcgaaacattgatggatcagttcaagagcacaaggtttttgtcacttcgtggttagagttcggcgtgcatgaagcccggcgacgctatctggacgctttgcagatggcaattgggccaggtatcaaagaaatgcctgacccttgtcttcctagtggattgcgcaccacacttgatggcagggttgcatcggcgagcgagacagaaccttatctgctaggcacgggcagattcgacgaatgtctccgtcagacatacccattgttggataaggatgctccatgtgcggatgaaccgtgtctgctaaacggcatccacgttccagctatcgacttcgatgttaaccattttatcgggatcagcgaatactggcacaccactcacgagattttcgaaatgggatacaaggacaaagcatacgatttcaatacgtatcaagaacgggtccaaacgtattgctcacaagattgggactccattgagcatggccttggacagcaaaaatggggaaagaaggttgatcgccaaaaggcctacgaagtatgcttcaaggcatcatggatcataaatatgctacatgatggcattggagtgcctcgcgtgggcttggagaatacgactggctctttgcacaacggcaccaaagaagtcttggctcatggaaaagaaaagggctaccttgatgctttccaggcggtcaacaagatcgactcgaccgaagtgagttggactttgggcaagattgtcttgtacgcgtcttctcaggtgcctctagagatcgaagaaggtcttccagtaggctttggcagcaatgtccccggtatcccggccgacttccagtatcccagtgttcaactactaccggattcagacagcttccacagtgagcactggcatgatgcgctattcgacggtgattctccgcgccgaatcccaggcttcgtcctcttcatgcttatcgttttcatggccggctttttcttatgcggacgcagccgtcgatcgcggcttttcaaccgcgtgagtaacgtgttgcgccgtggtgggccatcgcatcccaatcatccaaagaaacggaagggactcaaatcgatgctgccatttatcagtcgaagtgccccatcttacgagcgagttctcgaggacggtgctcaagagtatgagcttggtgccgtcgagtccgacgggagcgaggatggtggacgtctttccgaggcagacttggctagactggtaccaccgaagcgagcgtcgagctggggcagcaacagcaacactcccagtttcaaatacgcgttagataatagttcgaccgggacgattggtcttgggatcagcagtggtggtggtggctccggcatcgctatggaccgagcaggcttagtagtcaggacggagagcagggaccacctagctcccattgctctaggccctacaacgaacggccgtcggtcaagagctggtagtccgacgagatctcaccaaaaatcacccaacatgacaccactggccgacgactaacgcgacgtgctgacctgaattatgcttaattacttacactgcattgcatttccacttggagtttgattgtctgatgcgtcgactcatttcgacgttgtcttgtctttttctttttcgcaaagggagttctcttcttatggtgttgcgtgcgtcgtggcaggctgctttcaattcttcatatcatatttcaatactgtgctctggagtacctttttgttggttggttacggtgctttcgttctcaggccggtgatttacacgtaatgaggtatgtactattagtgattgagaaagcttttcctgaatatagattaatacattgctagagtctgctttgcgttcaaatcgtacatcttagtatcaatgagcatatctttatcaatttaatatgctagccctagtggtcaactacctacatacagtgattgttcacacgtttcaacacatttggttatataatgttctgctggcttataactaattgatatgaattcaaactatcgatcttatatggtatataccaatcctggctttcaatgacagacagctctaattcgatgagacattgtctcggagagatgccacagatgatctagatctatcccatgcttcatataggccgcgtgaactatataggtaggcggtgtataggtggggcttggatgaactgagcagttatcaatagtatcacgtgttagttttgctaccgccttggcaaaaacgatgtagagagaaactggcgcaactaagcttccgattcactcgttgcattgattcaccaagcttgttcaatattcttctacagcacttcacctatgccgtcgcgttaaaccccaccattccatacaccccttactctcggcaacagctctcatcgccaccgccagtatgcgcttgactactgagctcattcaaagttcactaacttacatcaatccgctcacagatcgtgagctggatctccgaggtgagttcacccactatagacctgcctgaaaagaacaggtactacacttttgattaagagctggattgatatcgtcttttgcgtggtcgtgcaggtcataagatccccacaatcgagaacttgggtatcgccaaagtaagtgctttgtttctttcaatctttgagaggcagatttgtccctgttacttctttccgtgttactactagaccaatttctggtctgcagttagctctgttgtacctatatgaatccaatgttgacagctcctaggatcaagatgcgatcgatttcaccgataatgacatctcctcccttggaaacttcccccattttcctcgtctccgcactctccttcttgcgcgcaaccgtatcaatcacatccaacccgcactcgcaacttcagtgcccaacctgacgactttggtcctaaccgcaaacaatgtgtctgaacttgccgacctcgatccgctgcggaacttggggcgactgacgcacttgtccctcttgcaaaacccggtgacgcgcaaggaggtatgtttagccctgcgccgtatactagttagatccggctatatatgacatggtccagactcaattggaagctaaactaaccgattcctgcagaactaccgctactggactatctggcgcattccctctgtccacttccttgacttccagaaagtgaccgacgccgagcgcgctgcagccaaagagctattcggcacctatgaggaaccctcgtccctcgcatccaagattatgggtgtcaagtcccgcaccttcgacgtttctacccctgctgaacgcacccccgccgaaaaggccatccgagtgcaactcaccgacaaggagcgcaagcgggtcgagaaattgattcgcgaggcgaagagtttgcaggagattacaaagttagagaaggagctcaacgagggacggatacccggtggagcggatgccgatggtgacgaggccatgcagatgtgagggatgagatgtggatctctcgcatgggttgtgtcgtggatgatgaacatgcaatcacgttttgtctttattttctcattttcttctcgtctggagcttggctttctgggtttcttttctggccctattgtatctgggtattcatttattcatgtgcccttagtttgggattgggaaaaaaaatatcccagctatgaattgtgagcaaaagatcatttgatgctctaacataaagtacgtgttagtctatcaggctgaatctagacaatcgccgagctatcctaaatggtctgccggctatcctttgcttgatgacccatctagcagcccagagtttccccattccatgtagagatggaatataccccgaagttatgagtgaatcccacagaatattgggagtccacgggtctacggttccactgtattggcaaattagtcagcatgtcatgtcccgttcaggtgatattccccgagtcatctaattttagttaagagttacataccattaatctataactactgcaaaggtatggagtatacggtgtacattcgtcgcactgcatgtctctaccattagacgatgcaacctcggtgcgttggcagggataagacggcacatagcgtgtaggggatataattaaacgaccatcaggaaatggcaaaaagtatcgtttatgattcagttcatatattgtatgtacgcaaaacggaggttggttgtggaaatacctgcaaagttccgatacgtcatggccacctagtgatttcaggactactgtcttctatatcttcaacggcatataagagttaccagaatatattttctcaactgtttccttagatcatagcctatataccgatgcgtattctttctaacctcgaatatcggttacatcgagcttgtgtgagatattatggaagtcccaatagctctagttgacgcacacaactcgagaagaccatccccactatggagtatactctgtcgaagcttggaataatgcagaaggcgggtcaagcctattcatgtttgaccgtggaaataccattcaagctgtgtcttcatcccacgtgttggttatctttatcccacgtgttgacctgagcgggcccttcatgtctgagagccacctaggtatttccaagatgaagaaggggcttggctagggcctgccaagtctcgtatttcatggcgatcacatcctaacacgagtgatgcgaggggaaagggccttttacggatgtgtgtagaggcttggttgcacttcatatccgcccataatattgatgaaatacgctataaattgcatctttcccaggagctgtacagagtactcactcagcattgttgaaagaaaagccccattggtactccgtaccaaaattccccatcatgcggtatacattggtcttcacgactcttctttctctctgcctccccgtcactatcgcgacagacccccgttactgccagaataaaacggttcttgatggtgcagatttcaccctcgaagaatccgcagacaatgctcacctccctgtgctctcaaagtactttgagtccaagggtaaaattgccaacatatctacggttcttcaatccgcgaatcgtgccttaagtaaaggttcgccctctgtcggcaatgggtctccctccgaggcatgggcttggaactcaggtgatgacgcgacagcgacttgggttccgcagggaatcaccggctctggtgatgctttgaatacgggaacgtgggatggccacgatgcgtgggtcgtcagttggtatcgttctggagaaagtgtacggcttagctttattgatcgcgcaacgcacaattatcgccatgtgatgcttgtgaatcctactgccgacgataactttacagccatcgctattcatgcgggtggtatcatgtggtacggcaatgtgctgtttgttgtcgatacccataatggtattcgtgcatttgacctggacaacatctgggaggttgagattgccgatggggtcggaaaaactacagatggagggtattctgcggatcaataccgatatgtgcttcctcagatccggtgagtctatctattatcttccttttgaccaagactgataccattcaaagcaattatcaatggacacccggctccgcttctcccttccgcttctcttggatttcgcttgatcgcagcgattcacccgacaccctcatggtgggtgagtttgtgtcagctggagaaactttcgacgatgccgcaaatacgcccgtccctatccgctatgtgaaatacgatctggattatgcgacccggaagctgaagactagtgggggcatcgcttccgcaagctgggcgtactgtgtcgatatacccaacgtacagggtgctgtttcatacgacggcgagttttacatctcgcgcagcacaggcaaagctcccaagcaaggcgatcttttcacttgggaagaggggcagacagcgacagagcacacggggtggttcatggctggaaatgaggatttgagctacaaccttgttcataaggagtactatactgtcaccgagtatgctggagatcggtacattctagcctacaaggtctagttctacttgatctgctattgagattatttccaatatccaccatcggtgacggtgccgacggagttgttaaacaaatataagaacaaaaatatcacagttgccatgagagctgatacaataattgatgggatacagtgaaccatgaaagctggacttgtctaaccttgtaaacttttatttatttcaatgacaacccttcggagactacatgcactctgaagtcactacagacgattagctattgactgctctaaccagagatatctaatatctgatcccccgaatgaaaacaagaatatctaagacttaaaaagacatcaatacaatcaaccgttattaatattacctccctgaaagattcctgatacagggcgctgattggattgatgctcaaatatttaggctggcaaactgcctgtaagtttccatttttggcatcatctgggtttaaaatattcaaagcacaaaggcttgcaaaatctcatgaaaatgcatatgcttcttcttctagtgtctacaagtctatcattcgatctcatactgaatttctaactttggatatgacctaactaagtgctatccgccgcgtattgggtgctatcgtcttaagggcatagtcttacactattcaactagcatttgaattgcatggcgaacaaacaaatggcctagtatattaaagatatcaagtgcaatttggtatgagtagtgcagaaggtaggtacgatgataacaagaccccgatacaattagacgatgaactcccgaagttttttcttgttgagaatttctccttccaccaatcgccctgtctcagtgactttcccattgacttgctcatagcgtaccagcgcaggaatgttcttagtgccccacgtttttcggtagacattttgggggttattccatctgatagatatcagttcaatgcaccacagggacacgctttgaatatgatttgaacaaaatcctgctcagacacgatggtaaaacttactctggcttttgtccaacctcgatgatagctaggtcaggcgcgtcatccccggcaaatgccttgttgatgtgaggcaaggcatctcgtacgtccggacaccaaggttgcttggtaattggatctggtgaagatatgaaggcaatgaataattttgagtccgggtttactgtcaggtccttcgccgagcttggcagtgtgagattcttggtaattggcattcttgcggcttcgtatacagttcgaacttgagtgcagggtgtagacaagaagtatgggcgagacagtaaaatatttttcgagatatgaagtcgaggcatttacaatccgacatgagacaattgtcaggtggcttttgttgattccatgactaagcatatcgcaattctggggcctggtggtgcgcgaggcttcattttgtcaacaattcaatatcgcaatcagtatcacgggtcctatttcccatgaacaaaggcacccttctctaatgagtgttggattgcaattttataaactggtagctatacattctattcttgtaagcctcagctttcagtcccttgccctattcactgaattattgatgcgtgaaccgacgtgtttttcctgatgatcttcttcttttcaagggacttttattgggctactatgtatgtggttagtgctaaattgtgaattgtggatattctcggattccccgaggctgggcgttgacacttttgtctcagattcaatgtgtaaaggtagaagcttggagaaaaaaataggcaatagattaagtgcaccatcttctgcttgcacaggtcaggctcatgaatttgagccacatagggtaccaaataaaacataaatgaagtcaatggcccctaaaaacgaaaacccgtacatttaattgacctggtcacttaagtctttggcctcgacgtcctttccctcatcatcctgtgcccacatgctatcggtaggctccccaggccacaaggtagcacagagcctacgcgcatctgcccagtcttcatattcaccatcagagctatacatcattagaatggattctctggacggatgtaacatgtagcatacctaagatcaatattcttcggcgccagcatcctctgagaaggatagatgtaacgaccacatcgtacggcctttcggcagtcttgcaaaaagtccactggccgggcttgcacagtatgaattgctcataggcatcttctccaaccccgttcagatttatgcctttctcagagcctatgaccacttttgttatctcatcttcatcttaagttgaaccagtgagagggacccggccttctttgatgattttggggatatcttcgatgagttgggcccaggccttttgccattcaggtgtatcccagccaaggatggcatagtagtgcgtgtaaatgtatcctattagcatgttgtcatctttgatgatgactagactgaccccatggttaaactgaagcggtgggagtattgtcagatgaaaaaggaggaaattaagctgttggaaggtgaactcagaaccacgtcacctatggggaatctgcataacctcacaagcttccaatcttgctgcggatagagagagggagaatagtgaagaaaagagtctatcaagtgaccatttaggatgaggttttacgttttactgcatcttttgagatgagccaaatataatcttggaaaaaaaattgtcacaaagcctccagtcctctgagcactttatccccatctttcattctttgtctaactgtaactgtctttcaaaatctcatagagatgactgaagcgagtgccttcacctggataacctagttaacgctaacatctctattaggccacttattcgataatagacgatcgatgcttagctccacagcttcgccatgctcttgatgacttgagaacagctgtccattcggcaaattgctatctaactacttctcgctttctggactctttcccaaacctcagtactcaacactcagaaatccaaagagctgttgaaaaggtggctcggtttgcgcgggagcaagaagagaatacggctcaggctgtgcaaaaagctcaaacggcattcgaagctctgtctcctgaacatcagcatggcttgatgcagtactacggggaagatctcaatttttatctcgaaatcgccattcctctggacctgtcgcgtactccctcaacccctttcagggaattccaggtgttgctatttgacattgaaaatattcaccgtgcacttgctcgggtacgtggagttgaggcgagcatcaccaatgtattttccagattaccgtccatccaacgactgctgctggaaaatcgggaggaggaacttcggctgctaaaacaacgcagctcagctgggattcaattgtctaggaaattctttgccttggatcgggaacaacagagtattctttggttatggtatcaagattctatggggatcagtggaatccggagggatgacaatgcggaatacccctactctgataggagctgagatggagataaccatgagcgtggggggattgtcaattacagcagtgtcccaacatgcaaaggtagaagaacacgaatggaaaggacgggcaaatagaggggaagaataccagacgcccgtgaggctgtgacagtctcgattggtggtatcattccttgaatcactgacacatgaatatccattaacaagctatcattgacctggaacccctgctataatttcctatttattggtatatctcgcattcttaatctcctctaaacattaccaatgcttgggagtgtggggtagataacgaggattctcggccagattgccgtgtttcgggaacttgtctttttcttatcctttgcaggtccactcctctatagcgcttcggataactgtccaaattgacaatggactctgcctcgagacgacgactaagaaggcgagttgccgacgagaatcgcaaaagggcaccccgagcgtatgcatcattcgtctgagacgaggcgtatccactaactgggcttagatgcgatcgctgtaaggccaggaaaagcaagtgtgtggaggcgactccgggcaaatgtcagcggtgccttgcaagtaacttggcctgcatgtttgggaggtattcagtccatgacctttaagaaagcgcttttttaacgtgaaacagggagaaatcgcctgttacccaggatactgcgtcgagtgaccttcccgaacctggtatagttgctacatcgaccagaaaccgagcccaactactgcaagatgatatcagtcatactgatccgctttctccggcatcagtcttgtcccaaaagctcgccgaacatgttgttgcaggtcaatctaaaagggccccgtggccaaacatcctctcccgtctgagggaggctttctcgctagatccggatgctgcacccgaagagagggacatggtcgccatgcaagccgtaagccatatcatatttcggttttgagcccatgtcaactgacgaatcctagcatatgacccgtccaaaggcgcttcatccatatgaggtggcacgtttacatgcagcaattgatgcattccccccgcgcctcatcgccgactttttgatttcggtattcataaaacatgcaacagatacattcttctactttgaccaggaccaaattctgtccgagattgaccaattctacacagacaccacctcgccgttaagatctgacttgagctttgtttgtcttgcaatggcaatattcgcactaggtagtcaatggacgcccctagaaagaccagatgaatttgcagtcagcctacatcgagataatgatgatttaggtcaagtgttctatactcatgccaaaacgcttatacccgacttaattgaccgaccctgtctccgatccattcaagcgcccttcttgctaggtgtctatctaatgccagcaagtgccatcggatcatcgtatgtctacatgggcttggctttgcgcaaagcattggcatttgatctccatctcaacccagaagatcaagcagttgacgaccgagagagagaggtccgatgtcggttatggtggtcaatatattccctcgagaggtacgtgatgggactctcgctgaaataaatctcactaaccacgtcaggtgtaccactatcaaactaagcaggcctcgctctgtcgatgccaatgtagtcaaagtaccacatccatcgcctctcccagcactggatcgtctgcaaaaatacaacaatattcaattccagatggcgtatgctcgtctgatcaagatcctcgatcgaattgccgaaccgtggtatgttgggccgattccgatagaataacaagcacttatattttatcagtagtggtgtcaccgaagcggaagaacagtcagaatccgaaggtctggcttctgatcttcgacagtggaagaagtccttaccgccagatttcaagcttgaaaacgtggacaccaaagactcaagatatcgcacgatcttccatctatatttgaattattactatgcgtggataaccatgggaaaagtcgcccttgtaacagttgcccgaacgagccttcgttatcatatgtttcctgcgtcgcgccctcctggtccaagcgaggccaccttgatgcaatcccgatattgcgcaaaggcgggcagaaaacttctcctactgttcgagaatttgacacaaacccgcaagatcactcgtttctcattcacggacttccagggatgcagtattgcgacgatcgtgacgctagtggctgggatcacagaacgagattcaggatacaatgctcgagtgaaatttggcttagactgtcttcggagaatggcaactggaaacatgacagctaaattgggggtaaagtttgttgaagccgtacagtcgataacaaacgaggccgcggagaagctccatcaagcgtcatccacggctaacgaaacacaggatgtacaaaattcggcttcgacatctgattacaatcaatgggctgaatggcttacgaggttggaacgctctcagaccctggagcaaagagcaatccatgaggcagagcccgatgtgccctttccacatactgtactgcatccaccacagtcaagcgataatacgtccgattggaggactgctggtgaacagtatatcccggaaagctcaaccccgcaaagcctagcacatggttcaactatgttgcgggagttccagtctatagagtacgaccttttgtcgggattccagagtgatgatccagcctttctcatgggcttgactgggattgatgtcctagacttctctgggctcacataaatatgtacctagtgaagagggaaatgcccgacgacacaacaccaaccatccaaggaggtcagctagcaagcttagggatcatacagatctcagaaatcatccttgtatcctagaaaaataactttctgtaagcccctttccattatgtgtcgtgtatgcgtgatttcctgtactctgagctcccctatctgacatccatgaatgagggacatactatcagcaccccaaattctgctagtcaaatattcgccaattagaaatgaggaagaatgagcggtattaaaaattcagaaggcggtataactatccaatgaggaaggcggtagcagaagtcactgtatatctatttctgcctgagaaacaaggcaactatatttctgccccactacgaagacctagggagtagggagaatgaagacaccacaccaccatctttaactcggatatatttatgtctatcatcacactcgcaacaccaactgcgatgcaatgcaatgcaatacagtatacagcaataatcattgtactctcactggaatctgaccatcctccagcaatgcatcccacctactcttatagacacgaccatccttcatcacaccaagcacatgtgcatcaggcttatcaaagacggtcacatcatcaagcgggttcttatttagaatcacaacgtcagcatggaagccctccttgatttgacccagctcatccgcgcatcccatcatcttcgctgggttcacagtagcactacgcaagatctccagtgctgataagacctgcgagcgcagtgcaaattcatgggtctgcgcagagcccagtggacccagcaaatcagagccatagcacatagtcacaccagcctccgaggcaaccctcaaagcctcaagaccagactttaacacgatcgaattctttgtctgggactcaataggcaggtagttcttccaccgctcagaagccatctgagcatatgcgataagcgtaggcgtcaagtagacccccttctcggccatgagcttggcagtgggtgcatcaacgaagttcccgtgctcaataccacggacaccattatcgatacaatgccggatagccttcacagtataggcatgggccgtgacaaaagtcccggcattatcagcacattccaccatcgcctgaatctccgccactgtaaactgcagatgctctagcttatccgttggcgaagccacaccaccggagcccataatcttgataaagtcggcgccgcgtcgaatctcctcacggacagcagcaatacactccggcacaccgttgcacatgcggcctaggtggttattgtcgtgagtgccgccgcagcattccgtagcctcatgcgggccgcgcagatcaccatgtccaccaaattgcgagagagcatggcctgcgatgaaaacgcgcgggccagggaagacaccgtcttcaattgcctccttcaaggcgagctgggcaccgccacagtcgcggatgctggtgaagccgcgatgcagcatctgcgaggctgtgtaaggctggcgcaaaaggtgtacgtcattcggattgccgaaggctttggataagtcactatagcccggaactgcgcataaatgtacgtgggcatcgaatagaccggggcagagatatttcccttggcagtctactgttttgaggctgattggtgaagctgggatggatgattctgagccgatgtaggtgattttgccctcagtggtgatgagggttgtgtttgctttgattgtgcctgtttcgacatcgacgatgttggcattgatgaatttgtatccctgtggtgcagggcgtatccatggcttgatgtctgagcccgggagggtggtttgtgacatattcggcttggggtgagatgatgctgataagccaagatatcgagtttaaatattaaatttgaaagctgaaagaaatcactttgcgggggtctctcacatttgtcgggaagttggtcgacagattcccgatgccatcggaccgatgcacttctccgcatatcaatcatatcaccgacaatcgaagataagccttcttttatagccggtgggaaatccggggcatatcagttttttttcccttgcaaacttgagcattcctcctctttgactgttttgttttgccgaaatccaattatctcattcgtatatatcaaggggcttcaatcccacctgtattaatggacaacttggagaagcgtgctgcgagtagcgacaatgccgatcaatcaaatggcgaaattctcgagcttcaggggagttacactgcggaggaagagaaaaccgtcctgcgcaagattgacttggtcattttgccttttgtgagtgcttcaagctgtctttcgggatctttttcgggctaatgacgcatacttccagatgtgcttcgtctttttcctgcaatatattgataagcagagtctcagctatgctggtgtcttcggtctaattcaagacctcaatatgacaagctcgcaatattcatggtcaagctcaattttctatgtcggccagctagtcgccgaatatccatttatatatctaatgagccggctcccattgaccaaattcgtcggtgcgactgtgtacgtttactcttgcggtactactatatctgtcctgatcatgcgctaaccaccaattcagaattgtctggggcatcatatgcatgtgcctcgcagcaccaaacaatttcgccggatttgccaccgtgcgctttctactcggcttcagcgaaggcgctgtctcgcctgctttcgtgacgatcactagtatctggtatcgaaagaaagaacacaatgtccgcacggcattatggatatctatgaatggtctggcacaggttataggctgctcccttatgtatggcattggtaaaaacaactcgcttccaatcgctccctggcgcgtgctatttatcatctgcggcgcgataacctctaccgcaggcgtggcattctttttcttcatgccaaacgggccgaaagatgcttggtttttgaatgcccgcgagagggaagtcctttcgctacgcatggcacaggatcgagatggtggtgacaaggcctctttttccgttgcccagctcaaagagacaataatggaccccaaggcatgggttgtcttttggtttggtgttttggtatgcatgcagtcgccggttttgacttttgcatctcttgtgatcaagtcgatcggctatactaaccttgagactatgctatatacggctccatcgggcgctgttcaagttgccttcctgtggatcggtgtcggcttagtatttatcttccctaatcagcgaacgctagtcattcttgttcttattatcccgcctctgattgggactgtcttcttgctgaagttggacgtgactgctcaatggggtcttattgttgcctcgtggctggtatgtatttctattgaccaggtcattcttccgttgctaacccagttttccgcagtcttcatgcattacggcatccatgacaccacttctctcacttgcggcttcaaatttcaagggaaataccaagcgcgctgttgtgaacggcatgtttttcattggttactgtgctgcctgcattgcctcgcctcaactatggacccacagccctcgttatacggagggtgtgataacatccattgtaacatggtgtctgctttttgtggttgtgattttattccgcttcttgtgcatccgagacaataagcagcgtgataaacgggctgccagttcaggtgttgtcagtgtggatgaagaggtcaaattggacgaaaatgggttgccacagacagatatcacggataaacaagaccgacaatttcgatatgtatggtaaataattgtttatatttgtttggaaagtattccgaggaggttaatatgatatttggcttgattttccgcatattataaacagtaggatcccagatggaacaagcaggccaatacacaaagttatgaagagaacacctttcggagttgaacttggtcattgttaccctgtgtagcaatatcatccttctaccttgatcaaccttaatatatgcagggacagaggctgtaacaatttgcataccatttttcctctaggagcacgccttgatgatatcggccgcacgctcagcaaccgcatagacggtactctgaaggtgaccgcaaacctggaaaggcatgacggaagcgtccacaacacgaacattcgaggttccgtaaaccttcagcgacgagtcgacaacaccaccaatctccttgggaagcatggcagctgtggtgatcgggtggaagtttgatcggtctagtcaaataaaaggttaataataaaattccctccacaaatctcccagaaacgcgaatgatacacgtacattgacctttgatgaaatcagcccagccctcatcttcagcaccagcagcaacagtagaaagaccggggctggtttcagcaccaaccatatcagcaaatggttcagttttgaaaatctcacgaataaaccgcgccgcctccacctgagaatgtagatcaaagtccagcatgaagtacttggggtcaatgatagccgccgcggtggggtccgcggaagagaggtgaacgctgccgcgagagaacggaacagacccccagtattcgctgctatacgaggttccagaggccgacaacaggatctccgcaacagggataccagatttaaagatcagatcccactggatcttaaagaagcggtatatgtcgcgggctttggtgatgttgccattggcggatgcaacctgtgctgcataagcgggaagctcgcgaagaagctcggctccgagcgctgtggagttggggaagagctgggctgctgaggggtaggcgacgtagtcggcactcttgttgctgctgtaggttttcttcgagtcgaactggagaccattgttcatttggtcctgcaggttttcgccgacagttggcaggttaattttggtggcgattccgtacttggaaagaatgctagtgagtgatttttggttagccttgataagatgttgaacggggaggtgttatggttactttgggtttccgatgccggaaagctcgagcagaacgggagatttcaatgctccagcagcgaggattacttcacgagtagccttaaccacggtggttgtgccattggaaaaagtgacctcgacaccattcgcagtgacctcatggccattcttccaggtaatcttgttggcgtgtgtgttgagccagacaaggagattgtttcggttctggtagggataatagtaggcacgagcagcatcctcacggatattgagctcagaatcaaccgtcttgggatacaagctgtatccaaccatatctccgccattggggtccaggttgtactgaacaggaacatcaaggttctgataggtagtgttcaatttctgagcaaggccgtcgttcaactgtgttgaagaccagccaaccttcagtggtccagtaaagccgtggtaggccggatcaaaagcaacaccggatccatccaagaatgggtactgtgccggatcttgcaagtgttcgccctttttgaagtaggggagcagagtcttccagttccagcccttatttccgacggtctcccacgcatcgatctgagctgcctgggcacggaggtacgccatgccgttgatggtcgatgttcctccgagtgcctttccggcacgtattgtttgtggggaaccaccggcatattcttggtctatcgttttgtaggcccagtcaatgtcggtatcaaacgctttgccgtatccgagagtgtcggtcacatttaggttgttataaacggagccgccggcttcgatcaccaggacagtggtgtcctttttctcggacaatcggtttgcaacgacgaggccactggtgccacctccaacaatgatgtagtcgtaagtcgactctgacttttgtgaggtgtggggaactgcaaccgctagtggaagcagtgcaaggccgatgaggctgcgcatgattgatatttgattctaagggaggagattcaatagtgagtagcctgagcgatacaacgaaagctgtgatttctttaacaatttgtctcgaggctacacggatgttttatacttcgggtcacaatatgatttacaagcatcgtggtccattttgtattcaggaacatggcggaactctttgtcagatcagactaatcccaacacgcgatctgcgtgtctgttactccggaataaagagcaaaacagaagaacccactgtctaccaggtatcccattcatcccgaaaccgtatatctaagtctaagcctaacgggctgaggccgaaatgagaagtagacccttctaaggttgcaattgtggatataatggataatcttagcacctgaaatctccgtggttttcccgctatagccccggtaggactattaaacttcttgtagtagtatgtctactcctatctgctgccaaaatctacgccagcagatccactcgatggctgcattaaccttggaaatcttactcattcttagtcaggaacaaatatgacccaccttggaagaacttggattgataatcgtatgccgatcttattcagagtttcgcactgcctacttctagtatatgcctaagacaaggtaaccggaacccggcttcgtgtttcacttgcttctacaagctgtttgagtaaaacagatggggatactatatccacgggctgtgcaatgccaagtaatatcctatgtctagggtcaccatgctcaaattgactacttctccgattttaagggtccttttagagaactttaggttgtactaattttcatctgataaaagaaaccgatctgataaaagagaattatgaacggcggtattctcggcccgtaaaatgtcagagtctccgagtcagccgagtggcgtcacttgtggatacaatgtggagatttatgtcctctgccaatgtacaaagtacaatattgtggttgatgaacagtctatagagaaacagttttcgacactaggcatcgacaactttcttggaataaactcggctctaacacattaccggccttgcatgattcacccatttgaaagagtaccttttaccaggtagaccatacaaaaggtatgtaaatgttggttttcctcaataatatcatactggagacttcattgtgagaattgggccagtcttgacattgaaggcataccggcatctccatcttgagcctagcaaatatgtgtccataaccgtcatatgattccaacccaaaactaaggaatatgtacaatatagatttcgattaatcccgtcgatcattgattatcatccccaggcattaaccttaaattagacgagcatatcgaaaggtaccgcaggtaaaagtggttgtgaaatagtcgaggtcatagggaatcgtgtttctgacgttgctgagctctacattgcaactgagaccgtatttcgaaacacgaagaacgtgaggtatgttaacgatattcaatttatattttacccactaattaccgaaaatatatattgatcatgttccctcacaatcctaccacgatcaacaaacgaatcattataaaacgacgcgaccttcttaggtcaaggatgggaaatcctaattctccacttgactttgatattgatcacttcccaagggtttgcaactcgtgctctccgtcgtatgaaccttgctcccgcggttcaagggttttacgcttagctagattatgggttaaccctaatataagttcatttcgttcgaaatcctataacctggtaatctctcatcgactgacattaattaaagatgcattcaggcacattttgagcttgtgaatgtcttcattcatacagcttagtagacctatctttggccgtttgcagagaagtttctcccggcttctagagcatcagtgttttgttccattgtcttcatggagctatttagaaggcttaatgaagttggagaatcatcaataacaatatttactcagttgatcgcatcttttctggagctagccaagctacgagaagtcatccttgatgttctatgtcgtcaatagtctggaactcggagttgtcttattagtcgggtaatggagcttttaggagattctaagaaaatctatcgaatatgaagctcttgtcttttgaagatgtatacaacataggcaacatccagagaaacaaaagtattgtgcattgttatcgcgtaaaaagaacgtattgccggatatccgagagctcggatatataagattctgtgacccaacatcattcaatgaagaatgacttcgttcccgatttttccgacactcatatatcacgagcactagaacggcacttccaattttagtgcctaagagtctttagcgttcatcttgctgatatgattcaggccaacttctccgaagccactgttatcttttgcggttcatagtggatcaaattgataggtgttggctgtgaattttaaccaggccaatcatcatcaaactttgcgtaagccccggttttatttttaacgccataggactggtggccaaaaaggtgggagatgggttcaaaaagaactaccggcgactcaaatcttccatttcatattattcactccttctcccaatacctgaaaaggttgtataaagattgatcatgggggccgacagtatcaatctaaagccggtcgagtcggcgcgctcactcgcttcgactttctcgcccatccacgaggtctttttcgttgccattgtttgcatgggtcaatttatgacacaaaccaatgtcggagtatgtctttcgccgcttgatactgtcggtgatagctttggtatcgacgatcccggcatcttgagctggttcatggctgggtactctttgaccgttggcacattcatcttggtgtctggccggtgcggcgatctgttcggttatcgtcgaatgtttattattggattctgctggattgcgctttggtctcttgtcgcaggtgttagcgtctattcgaactatattctctttatctttgcacgtgttttccaaggcatcggtggcgcattgctgatgccaaacgcattggctattcttggagccacgtacccacaaggaaagagaaagaatatgattttcgccatcttcggtgccgctgccccaaacagtgcccttttgggagctgtcttcggcgcaatattttctcaattggcttggtggccttgggcatattggacccaggctatcgttgctctctgttgcgctgcagtaggcctgctcgtgatcccatccattcatcacgacgctaagtttgagaaatccttcttgggcctgctcaaagctctcgatgcgcttggtggagtttgcggtatcggcggcctagttcttgtgaacgttgcatggaaccaggcgcctatcgtgggatggagcgagccctacgtgtatgtccttctgatagttggaattttgttgctcgctgccttcttctatgtcgaattccgagtctctgaaaaccccctcattccgttccacgcattcagtcccgatgtctcgtttgtccttggctgtgttgcttgtggctggggctcattcggaatctggatctactacttctggcgattcgaagagaagttccgtcagttgactcctctcctgacctctgcccagttcgttcccgtcggcccagtgggtatcatggcatgtgttgtcaccggctggctgatgggccgcatgcgccctgcgctgattatggtgttgtcgatgactgctttcacagtgggcaatgttcttatagcaattgcaccggtgcaccaaacgtattggggactgacatttgtttgcttgttagttaccccttggggtatggatatgtcgttccctgcagcgactctgatgttgtcgaatgcggtcgagcgcaagcatcagggtgtcgctgcgtcactggtgactactattgtcaactacagcatctcgctgagtttgggattcgctggtaccgtggaagttcacgtcaacaatggaggttacactcccagcgatgtcttgaaaggatataggggcgcattatatttagccgttggtcttggtgggctggggatgtttctcagtatgatatacgcattcaagggccatcgaactgagagacagccggtggaagccaaaaacgaggaagcttaggaataggctatcgtctagaagtacgtaagatttaatcttatatcagtataatatcagttaatcacctacaacgcggtcaagctaagcttttagcaaaagtgagtacaatcatatatgggatagacgacaaggggtaaacaaatgagaagagccgggctactaagacttgatcctgaaaatgaggctttattgtcgatatcgtggagtccactggctccataactcaatgccgcacatgaagtattctagacctttgatgtacatctctagttcatgtgtcaagccttccatggtgttgtgtcggatttcaacgctggattgtttgaaaacgagctccaattcccgacaatagctatacattaatcgtctgcaggctgtatatggtagtcctgtctcgttcgcaaggatgtagatggcggagaatggctgggcaccatcggttgggttttcctggtatactttccattctcgctcccagctatagatatcattcataacactgacatgcctaaatgcggtgctttccaaagcggctgtattttcaagtgcggtgggagtgagatcgagcttggcaccaaatctaatgagggctgtgtagagtctaaatggccgtcagtactcatcaggaatgtctgaaaatgaacagcgacagtaattcatacgttttgcccacatctgtctccctgaatttgaggtatgacccgagagtgtttgctgtggttctctcctgggacgtctgggcttgcagaagctgacaaaatccctgggcgacatcatttgccagaacctcgtccatacttcgcatggccatgacagtatcgtgaagcatccactcaagacagatacatctgtctgggctcgctgctccaagggcaactttcatgagtcggtctcgatacgacagcatttgcgtaaaactcattttttcaagttggtctatctcgagagtcaataaatggccgaacccagtctccggctatcagaactcaccgtcaattagtaatgacaagtaaagcattttgcatgtcacatcaatgcgatcatatagcgtcaatgggaaaaagtgactaaaggcgcgggataacccaagaccaaggaacccctttttctccttctcactagggaaattccaattgtcgccaaaataaggctcaacctgagcttgaatcaattcccaccctagtggatgggtttttgattccagttggcttgctgggatcgcgcaaggagcattttgtgctgttgagtactgcctggccgaattggaattgtttgttgagtagagataggatgaaaggattggccgattgacagccaacgccactttacgtcggcgttcatttgtcaatttcttccagatgcatatcctttgaatccgatgcattgcaacttctatcaattgcatccgtgaggccgggctttttggttggcagttgtcaatctccacaacggaggctgcacacatttacgcacggaccaccgaaatgtgatgtcaccaacatcgatcaaccgtgggcctgccactcttcttttatctctatttctaccccaagtttgcttcgtacaacatcctaatatttgtacttacaacaccaatcgacactctctccttaccatcatcctatcttgaaggctgaattccctattagctctatccccaccaatccgatcatcggcgtttgcaagagaaagaggccaagatcttcgtgcatatggttctagcttctacctctatcagccatcagagctctctgcaggtggccctacgacgacttagtgcaatcaaggtagatagtggaagtctctcaacaaaggttgtcacaatgagcgcaccatcaggtccgccacgtgccccatggcgcgatctccttggctctcatatcgagcaaacacctggatgtgaattcacaattgcaacaattggctacaatgctcaacagcatcctgtacctcgcctgcggacttgcgcctgtcgtggtttcttcccagaactcgagctcaacgctaagggccaggaagctatggatcagcaggtggaaggcggtgctaatccacctgtattcgaaagtgacatgctgtcatttaccactgatgctcggatggacaagcttcctcaactggagtcctcgggtcatgcgactgaggttgtattctggctgaaggacctcatgactcagtggcgtgtcaaggggacggcatatgcaattggcaacccaagtggagaagatacagaggaagagaagctatcccgaactgagataaaaaagggattgagagtaaaggggaatactgacagtgacattgcgaaatggacatgggaaaaggctgtcacaaagtattttgcaaatcactcccctatcgcaagaggtatgtggtctctatcttgattcttgggcgcaagtgctttatgccttgctcttatgccgattgaaaaccccgttcgcctgtcatcgcctgctcatactgactgggaacctaggtttcttccgatcccctccccctggacaacctagatcctcaactcctagccaactagatctcaagctaggtcaaaaagttctggaccttcatgaccctgttgcacgggcaaatttccgagtcgtcatcattcggcccgaagaggttgagtgtttagatcttactgatcaagagaacggcaaaagatggaactggacgttgattgacggaagcgatggttctcggtgggatgaagccgagttgtggccgtgattctaccaatattgcaaagacacttgttctcctggataagttgtatccaaaaaatgtgtaatcgctgtcttattttgatatttgcatgacatacgttggatgttttcatcttaggttataagggtgtatatctataggcttcaatagagtaccaaaaacggtcaagcgaaatgttggtagtttgcataggatctttgtttgagcagtgtctagtgctgaaacttgcttgacctgagattttgttgtgctttctggttgtcgcctgcctgaaagaaccctcacttctaccaacttgtcacaactttcattcaccatcttattctatctcattagcaaaagtaacttccctcaaaactgatcccttgacctgccttatcccaactaaatactgaccacggacacgttcatatagtgcctgatactgagatgcctagcgataaccctgcctgtgctgactgtaaggccaagaagaagcggtgcattcaccgtaaccaacctgtgaaggtcgcgaaagtcgaagccgtctcagccagcatgtctgccccctccgctaccgctactgttctgacgcctgcgtccactccagtccctgttgctgttgccggttcctccaccagagggcgacgtaagaccgctgatgccacaacgaaggtactgacaggtctgccgttgacttctggtttggattgtcgtaaagctaacacacagaacataggagatgagtcccgctcctgccgactccagcgacgagctttcttccgtgccctcggaggccgaggagaagccgatggccaataaatacaccacgcacagtcgccgtgctaagacctccgccgcctccgagaacgtagccctggcccttgacctctcgggtgattctcttcaggccgctgccaccatgtccgtccaccgtgtctgggcccgcgaacttcgggacaacctccaggaactcgagaggtgtatggaggccttcgatgaagctcaccgagctaccatggcctctgctcaggctatccagcatactgtcgacggctggattcagacctgggctgcttctggtcattaagcattcccaacgttcaccatcgcaccattttgtagcattggaatgggtacttgcggtcatttgagatgttattggggggggaactactccggactggttctcatttgagaagaggaaattcttcggttcctgatatagggcgtgctcgaccaggtttggacaattcacgtggctcggcaccgattggtttctattttggtatgcctgcaagcatccaggcctatgaattcgacatgtatgctccgtatttgtaggctgtaatgattcgcatagcgcaatcttggacactagaatacccatcaagatttgtgtgtgtgtgcctaaacctagagacctcaatgttgtatgtacaatatactgagtactccgtagcatttttcaaaatatttgaaagttgtcgagtccgagggggtcggggacagaagtacttggtggatggggtttttacgatacataccagcagctacagcctatcaatgtgggttcccccttccccccccccccccccccccccccccccccccccccccnnnnnnnnnnnnnnnnnnnnnnnnnnnnnnnnnnnnnnnnnnnnnnnnnnnnnnnnnnnnnnnnnnnnnnnnnnnnnnnnnnnnnnnnnnnnnnnnnnnnnnnnnnnnnnnnnnnnnnnnnnnnnnnnnnnnnnnnnnnnnnnnnnnnnnnnnnnnnnnnnnnnnnnnnnnnnnnnnnnngtcccccctcccccccccccccggtctccaaccactgactctcccgagtcttccgcggaagggatcgtccggcttccaatagcgtgatagtgtgccagggtctcaatttttagtgtttgtttttcataaaacacaggtgcttttgtacaatgtaaagtccccgaaagggcacttacgtgtcatctcctaccaaaggtacccatggatatcgacaagactattatttgcctcttctattcggcctggtctgattcgactttcgacagcaatctccccatttctgttgccggagactcgactttctaaggatgggcgcttatacagatcttctgtcatactgattatcatgaccttcttttgagcctatgtcaaaacgctaccacgtctaacgatcaatagtatacaacatagagcaagctaaagtagggctccgtacatttggtcccttgaaagcaatactagtctagtcagtctgcacaaatagatactaatacatgtagcaatcctacctcaccgctcaagtgattcacctacaattcctgcaggattcctatcaaatacatcacataggggtgtcttttccgtaccgaaactgcctagccccatataaatctttttacaaatcggtacggcccaccgaacacggtagttaccatactggtatcatacggctcttcgattatctcaatttccaaccctcttttctttcccttgtgcctattcacttcccctctccagactctgcttcaccgttacttgatttttttaactgcagatcctatccaacgcacagctcattattgaggggttcctaaagacgccttctcttccaccctaacccacacccgcaccgcgatctaccttctccgtggcacaactttgtctcttcgccgtgaaccattacgattctggtcgacttacgatttacgacgaaacgaacaccggaaacacccgctcaaatataatactttaacgcttgattctttgatttccgtgaaagcgtggcaacaccggggattcagcaatcgaatatctgttagccatggcatcaatggatgctctaggggccttcacctatatgagagacaatcttcctgcatggatcacccgcgtctcagagcttgctacacacacccacaagagacacgacgagtactctgaagcttacagacgccacgtaaacttcaagccccgccgacggaaaaatagctcggtttgctccattcataccgatgacctcgttccgatcgcacaaagaaagagtcccagcccagaacctgtggtagttgggacatcgcaggatgcgcccgagcaaggccaacgttcagatcgcaagcgcaccacagatgaggctccatcagtcgagtccaatgaagaatacaactcgttggtaagcacacggcacaatgtcatcatcgagtatgatggccatacacaacaaacacttgaggcaattgtacgcgatatcggggtggccaggaacaacatcagacgagggcagatgtcattgatgccacgtacagggctgcgagcgagcttgttgagcaaaggcgtgatgaatatgccaagtgcactaggacagacaggcccactctcttgtgttcgcagtactcgactcacatctgggcttgtcggtatctccgggaccagcgcacttcggagagactccccttttgactatgcagacaagcagctggaacttgcccattcgctttgcgagacggcatcttaccaagtccttcgatctggcgattgtggaacggaactggacggggtcgaggagaagttcaagatgctcctcgcgacggctatcaacgagatcgaccgtatcacggcagaaaagaagcagcaagaagaacaggagcaacagcagcaagaagggaccgcggaagagggacctcccaaaccgccccctaccccctccgcagcgcgactcgcaatggttgcttctcttgcaatgaacaagccctcgatggccacggcaggcaccattgaagtcgatgataactcgtctctctcggctgaatcgattgatctctctgcattccggtcctctcggatctgagtgtacacacgggcagccagcacttgacctcatattagccatttagcgtgtgttgaaccccttccagcaaaaccattgcagccagttgataccttcgatctgttgaggccatctctttctctttgattggccttggttttttttgcctttctgcatctttgattgcgatctgatttgtagttgcgggggcgcatacgattacaccattcattcccttgtttgcggtccatgttctattcctccttcttactgtcttttgatcccatttttgaatattgctgttcttgtttaggatacatacctcctgcctgtctcttgcatcagctcatgactcattcccaagggagcacggcgtttttatcactatttatgtgttttcttctgtggcttgagtttcttcgacctctctgcgttcattacaccgatcattataccgatccattctgagtatatatttatggcatgaatttgacttgttcgtggaatttttagctccgttggcaaacttgcatgcatgaggtcctatgcaacatacaacaaagaatcgtattacattcaaggcgtaacggtccggacattccatgaccgattgagtccagttccaccaataatgtggaatgtactccgtacaatgacttccctgtaataatcccatattcagcctggaatgtcccaatgcatgaccgttgccgttccctgtctcggcacggaaagacaacgccatgcatgtcttttgattgaatgattcgctaagcaagcgaagtcgccacaaggacgggctccgttgcgggtccgggagtcatcgagtggttgatactgtaaccgtcctaattaagtataggcttaaggtggagataatgagtatgtaggtgggggggatcaattctttgtgcaatatatgttgtacatactaactatcatctgcgagtgcattgccgctcaaagcgtctttattgttccaagctgcggattacaatatacgtatgtacgcatctttcaatgtgtcttttttgagaggaaattcaattaaaataactatactccgtacaatgtactaaaaaaagtccctaatctagccatgcgtgcgtggacatgatatcgccatgcatggtctagacacaattttttcggtctatcatggatgtagcaggtgaaatcataacaacatatgttgctcccacctggcaggatgtgggtgcagggatcttgcttctcgaatataccaaagtacatacatacaatgtaattatattctttccctctgattctatggacttcggcagcctctatccctaggtctatccctaggtcctccttgggaaacagtggttcttttgagcataagctctaaagatagtgaaagatctcaatccaactaatcaaatagaaatataaaatgctatatgcttatcatcagagcggacacttgattcttatgatattaatacatacagtactccatacagtaattcagtatgtattgtacggtgtatagacctcccgctcgcccgtctccttgccgatcaacacgctgtcaactttaccttccccttttgggtggcacggataattattccagttgtttttttcatgggacaaaggtaccatgcaggagagggggagaaagacaaatttgagtctttctataatagcattgttttcgaggttctgctgtgcgaaatacaacatactacaacatatatcgccgtatattcagaaatgcgtcctacacctaataggagatgccgcaatagatttacagtctacatagaagataacccaaattggtatcatggcccccacccctactagccggaattggcgggtgttaaaggataagccaagcaagccaacgcggtgtcctaccggaagcccttaattaatcctgggaaaacaagtatatttccatcgcccttggcggcattggccctgtctctcttacttggtgctggatttacaaggatgtgaatcaaggtgcacatcctatagtaggctcctgccttgtttggaaagaggcgattctactagcttactatggaagattcttctaatttccattacagttgtctcggggagatgttagtacttctggatgtgatgtctatattgtggcataatcaaatctcgcttgtaagaatactccgtggtgtgctggtacacagcacaaacttctgtgcgggtattcaattgtactcgaaagaagcttacggagtacttgaggtgaaacaagatattttgggggtttgggattagatacgagtaaatgacagtctagaactagctgtatcaatgacctcggtctcgacaaaagtacctacatgtcacatgtgcacaggatgtacttttgtaaagtacgaaagaagattgatcgtatctacaacttatgacaactgtagtgcctacgatgtactgtgtagcgcaagcctcggcagtagagagccagcttatttattgatcgattgataattctcaatccggtggccgcatcgcgatttgcaatagatccgagaagtcatttacgatatacgaagtgaagtgccccatagagaagaacatatactatatattcgagaaaggtgagcaaccttactatagtaattacatagaattctttacaaacccaggagatgaatgcttgatagtcaagttgtagtttccgaggaagctattacccggttctagacgctcttcttcaagcccaacaaccatgcaaaacaggcaagaaatccatttaaacattttgatattaaaaataataatcaaaaatagaacttgatgcattgacggggaatcgaaccccggccactacttatcaacacttcagggaagtatgaaatggaagagtagtattctaccactgaactaccaaagctgtcttattggttctgtcgccttattacgaaatctggcatctaaaaagttgaagcattaattccctagttttatagaactacgaggtaaaatgatatatataaatttgccgtaactagtaagtgtacagtggagtgctaagggtaacccacaacaatatccgggttcataattgcttcttaaagtcagcaaagtagagattgaccgacttgacctctagggctggccctatggaatgcgcctactgaagtgagaagactgaggatgattactgagctgcgaggactggaactttaccttcggagggccgcacatggaatgtactcgattgtgtaggggtggtgtatttcgcagttggaagtgcggatgacacactcactcactaattgcatctcaaccgtggcatgtgcttggggaattcgtgtgatctagttagatcgacgagaggcgtgtacaaaggaaagagcctgcgctggaggtttactcaagcaatctacttcgctgcgtaagatcaagtgctcgagctaggtactcgatgtttgaacaccccagatttgattcaccgtgtttctctacaagaggaactacaagcggatcttacttaatgggacattttgatgctgctggtgagccggggtaactcggcgaggtattctgtataaataggatgttttggcagcgtggatgtcaaggtacacaaccatcactataactgtaatttgacatattttgattcagtatcattcatgtccaatcaaacatcaaacgcaactaaacggatatcatcactcataaccccttgttccttctattaacccattgaaaatgctcaacatagcccagccctggaatacagacggtacgaaataagaaaaagaacaacataatcaagtcacaaaaagcaacatctcgtctcacatctcctcgaaggcacaatcaggatgcatgacgaaaaggacctttccgtcattttgggcgtcgtcatcggttccatccgtgaggccagacccggagatacgcagcaagagcttgtcctatagagtaactttattagtgacgttgcttgatggaaatttacgaatattgccatagcaaaggaagatctactaaccttaaccatgcgtttcaagaccttgcctgccaactcgcgctcgcgctcgtaatcttctttggtgttaagttcaccctcaatttgctccaagtaccagagtacaagatcttcttgctcgacaccctcgcccgagttcacctcatcctcatgtacccgcctgacaatctggttcaggatcttggcgtacttgtcataggtgatcttggtcttctggcgttctggctgggcagcagcttgagcaggctctgcaacgtcacgcatagggctgtcgccatcattatcgccatcggccatatcctggtcttcatcgccatcgttggtgtgagtaggtacatcatcttcaatctcaacatcatctttctcgacagtcacgatactctggcggagaagatcgtatgcctcaatgacgaacttgggaactacctcctcgacacagttggccttggcgacagcctcagacaaacggatcaaagactcgagctggcgaacagtgatgcggtatgaagagcggcccacgcctccctgggcgtcgttggagcgcagctccttgtatttctcgaccagcagtgtctttgcctcctccgtgaagactgggcggaatgtgcgtgcgaaccggatgtagcgctgcagttgttctgtgctcagctcgggctcaacagcctcatcgcggtacatgtgtacgttaacaatgtggttggccaaactgcggtcaacagactcctttggatcatcgcggataacaaagaacacatcgaaacgactcataatgggagcgctaaagttcaagttgttccgaagagtttgcttcgggtcgtaacgaccattaacagggttagcggcagcgagaattgatgcacgggcattgagagtagtatggataccagccttggcaatagaaattgtctgctgttccatggcctcgtgaatagcgacctgatcggcgatatccatcttgtcgaactcgtcgatggcacaaataccaccaccattctataaggaacatgtcagcgatgagcccacactcagttggagccacatttggaacataccgcgagcatcagtgcaccggcttcaatggtgaactcgcctgtctcgggatccttcaccaccgaagcggtcaaaccagctgccgtagaggctttaccactggtgtatactgcacgagggtgcagtgagcagacgtatctgagtaatcccgtcagcaagcaatgtctacatatgaggagtgggcaaaacttacttcaagaactgactcttactggtcgacggatcgccaacaatacaaatattgatatcaccacgaagtttcatgctctcaatcgatgtggacttgccgacaccaccaatcaactgcaaaagcagacccttcttgatttgacgatgaccccaaatcatgggggcaatcgaatccacaagccgagagtaaatataatccgagtgcaccagtcccttgagatcctggacttcagccgaggtaagactatgtaggaaagcttcttgggctgattcatctccaaggtcatcctcctggttttggttcaaagaagccagaatattatttgactggccactcagctgctgctctggcttttggccaggagtggttgtgtctggagtaaccatgcatgaaaggaaggccaatcggtaagtcagatcacgtacgcccagagacttcaatccagagactccactaccaccgacctcgttgccccggaaggagttgttatcgcggacggcctcagggcgcacaccgggaagacccaattgactgacatcaggaacaacaatcaaggtgcctgtaaatacgcagcgttccccagccttggcgcgatcaaccatctcaccacgcaaaatgacatccattgtgcgtggcatactaccagtcgggatttcgtgcgatgattcctggagcttgactttttgccaatcgacaaatgtactttttccgatatccagacgccatcccacgcggttgccgcaggtcttattggggcaatccattggctccgtatatttgaaagtctgctcaacatttggaactactgtcttgcaaccttcgcagataaaagttcccagtgataattctggtctgacctctgaagttcttgtgacagttccagagacggaaagcaattttccgatctgattcgtccgaagctgtcgcagtctggaaaccaaaggtaggttataaaatgcaagggcaaacattttgtcggtttgctggtggcgagttttctcgcggatctgacgctcgaggtcgggattatctgaaactcccgcatatgctgaggcaaccgaggtgctggctcgcgaagaggcgctggcagtcattcggtgggagacgaagtattctggttcgtacttggcgatgagattgtgtagtcccttagtaaggaagggttggaaccgatagtattggctggcaatggcatctgccaagacgggattatggatgtgcgtgaaatcaacgtagagagttgacagctcgaattttttcatccccttaatctgagcgatataatacttgtcactaagaaactcccctgatgagggcggtgcagaagacgagggttcgtcgatgtatgactcgagcagctcttcaaatgcctgctgaactttctctgccgcctcatcgaccaccggcggcgccgcaggggcatatggattccgcatacggctgattgccgaacttcccgctccgacgacttggtcatctgggaaggcattcatatcactcatagggccattgctttccgagcgccgggagctgggcagattatcggagcggaggtttcgatcgcgagaaggcgcagagcccagctcggactggatcacggcgtcgaaaagggaagacatggcaatgagctgatggccttagaatggccaatgtaaagaagggtattaagcttccacgtgtgaggagaaaaagggaaatgtggagagatgatatcgtagactcagtttgctatcttagtttttcgtgggtctcgttcgcgggtctccttgggcaactagggcgcgacgcgaacgcgtattcggaagaacagttgatcctacaccgacgcgttaagtggtttcattatgtaagtatatacgctaacccatctaggcagtaggtccttcatcttcactacaaataacattgagtgtctgacctagtgtccccactaccgctcatatcaggcgtataaatgtcaagacccgtatttttcgaggtcatggcctgactgctggtttgaaacatgttcatacctatgagtgaagggcggacagaccagcatatacttggaaactgcaggtttggccggtttggcttgttggccagaattatttcgcagtcttaatatgagagttgtgaatttaagtgggtcacggtcatatatcctcggttgtcacttattgtgtggaagggagtatcccaaatccctacttcatattctggagtacaacgtaatatatatttgaaatgaaaaaaagttagttttggtgtcatcagagccaaaatagttgcagagaaagtaaagtcaggtcaataatgtaataccgttctgacgtgcatataaccattttaactaatactccgtaccccgtcttggaattaattaaatgccggtttatccattgggtaaatggttgatgcttggcgcttatataagagcttcttccccccggggtgcaagtcgagcatctgaaaccatcctattttttttccctccccgggaattatactcccctcgcattgtattgcctcgtaagttagactattctgtgctagcgtgctttccttcatgccctttcttccgcgcatattctccgtgaccgtctgacacttgtcatgacgtaggacttttgtgtcttgcgatggtttcttccaaatcccgagtccttggctggaggaatcttggtgactatcggtcggttatgcagttttgaccgttccattgtgtcgacaaaggaaatctttgttttcgcagctcgacatgtctgagaacgagcgacggttagtatcgacactgaccaggcccggcgctggcccaccgttgggcccgtctgacacggatgcatcgggtatgccccctctcgcctttacgagccaatctcccaactcgcatgcacaactcaactaaagcttctcgtatagcaccttctgcctctggccatggctcccaaactgccaaacccggaaggcgccgacgcgccgctgaatcgacgaacacacctcccaagaaccaacacttctactttgtcgatcagaactcgtcatccaaagaaaagcgtgctcatgttatgcgccaccatgtacaggaaaaaaggaaacagcgcaaaatgtcgcatagcacaacccccacagagcacatcccagattatatctcatatccggcgaagaaagaggcagaaactgctgaaaagactggattagagtcgcgctcgacagctgcgccaaacttcaccaatggggaaacttcggtacggaattcgctttcctctagtcaagtacttaggccacagccaaggctagactgtctaggtgtcggcttagcctgcaaagcatgatggatctagatgctaatgccatggtgtgtcacagcttcaaattcgattttcaaatatgaaaccgcaacctcatgctcctgcgctaccacccattggctcgccaatcacgatactcgatgcctcgcgaagggatccgttttctagtctcccaatggaatacgataatagcgatattgaattggctgactattggaggaacaagttgatgtactggtccggacaaaaccttcacttgaaaaaccagattttccggacggccatgggacaccctctttctttcaaggcagtagttctgtcatactgcgcgcggtggaaagcacagctgtacggcatgtccgacagcaccgaaatccagcgccatgttggtcaagccgcgaaaatcattgatgacattacctcaggctcggtgctagtcagagcggatgatcttgcaatggccttgggtggaatggccttacacgaagggcgcttcggcagcaaggaactggcccagatatatgtaaaccgcgcggtccaggtcatgcgaccgcgaacaggaagcaacaagcccgtggaggtgtttattcactacatccgatatctgatgatgccagaaggccccgatattagttttaccgaacagcaatggctgctcacttttttgcgaggagccgaagatctcatgcggcaacacagctcccccgaatacctcctcgaagcaccccatagactcacggctttccagatggaaggtcctctattttccctgctgtctagtgggccgcggccctcccaagtgccgcacgaatctcgtgtatatgtggttcgcgatgcgcatacccaagaggtcagccgaacggcggccctcatctatattacggccgcactgtgggatttccagaattccccaaataagaccgaccggttccttcagtttttaagtaccacgacaaaacagcaccacctcgatcgtgatccagcttgcgaaacccttttgtggttgctgctggaggaagcgcatgattctgatttacaagaccccgaacgcggatggtccactggcgagctggtcaaggcgcacaaacggctacggcctgacctccagttccagttcaacgagattctcatgagcttcttatcttttcagacacccattcgcggtgtcaatgcgtttgaagaggagcttcgaaatagtttacataattctcaatgaccaatttttattacttggattcgagtcaacgcagctactctgtagttacaattatgtcgacaatggaatgtcttggcagtacccgagtaccaggataagcctaagtgtcattgagttcaccgtagtggagatcaaggggaccttggaagctccgctgtttgccccggttccagttttccagacaatttgatattcttcgtagtgtatggatatattacgtaggaaaaaaaagtagctatgttgtacacttggcaaagaaagatcgggtagctgtggtgacgcgatacgccgactacatatgcatttggttagcgttgggtggatttgctgtggagatagttacctcggcgttacgcatgcgctcggaactctctacaacatactaattcatgaagacccaccgtgacttttgagatcgatcgtgatgcaatttgctgggctatggctctaacactacaatgtggtgtatatcattgcagtattggatcaatgcggggcccacgattcatatcgcaactaattctctcattatgggatgtattaatatggcgtaggaaatgctgcttttttgttatttgggggcgcagcggaggtttcaagttgtgagaatgtcaacccatcttagggctcgctaatttcacctacaacatggttactaatttcgacttgccaaggggtttcatgcaactctcggccccactgaacacagattcaggtcaataggggccaatagtgcaatccactatccagccttagcgctctctgtggcaaaaaatccccatctatacaagagtgattggatccagcgcaaatatgaaatgatcattcgacgatcgcttcatggcttatcgaattggcatgcaatgacacgaccgtaatgatattgatagtcgaaaagcagaaagaaagaaagcactaacccagaacaacctgcatgtgcatcgtttgggactctgatctgcggagacacattaatattactacggagtacatacccctggattctccaagggcaatagacaaattccctaaattccctatgacctttttccatttccgaatatgtgcgaccgaggattctgtacggggtacagagggcggagtatttccaagaagtttgttttatcccatagcatcccttacgcagttacatccctgctgtcatgatcgccatgtatgatcagctcatttatcttgaataactgtggctgtggctggggttctgtggcggacatctccggtccgaggctggaaaaattcaatctcggattaaaaaaagatcttacgaggtgattggatcaaagaatgggtcattgattacgacgaggggatctctgctcgcatctcgaccattgagcgaaaagtctggattgcccactcgccacccatggatggactgtcgctagatgtgagattaggttcgattcctgggaaaaaaaacaagaaaaatcacgattgaaaacacaaaataggaaagtagcccaaataacaaaaaacataatcaaagattgtccaattacgtagccagatcgcagatcctagtccttcccctccctgctggccatggatccctactaaactttaagcttctctcggtcttttccctcctatctttcatttttctttcacacttggggaacccatcctcccctcgacacttcacacccgtggattcgaagagtgttttggacattttgaatacacctttgcgaataccttcacaatggcccacgatgccgtgcactggctggccgccagggatacggtaagctctgtcgaacacctaggtagccggtcctttactcacgatactagagcgacgacccgcaggacaccacgccgacactatctggtctgctcaccaccctaatccctgctctcgtctccttcgttgtgatggtgttgctcttcatcatcctgcgcaagagcaatcgcaggatgtacatgccgcgaacctacattggatacctccgtccctggcagcgcacccccgattctccaaccggatcctggaactggatcaaggcgatgtaccagttacccgacacctacgtcttgcagcatcactcgatggacgcctacctcatgcttcgcttcctcaaactgtgctccgtgatgttgttcgtgggctgctgtatcactttcccgatcttgtggcccgtcaatgccacaggcggtggtggaaagatccaactgaaccttctgagcatctcaaatatcgacgagactcaatacggtcgttactatgcgcattgcttcctcgcctggatctatgtctccttcatcttcttcatgataactcgcgagcacctattttatatcaacctccgccaggcgtacctgttctcacccgccaacgcgagccgcatctcgtctcgcaccgttttgttcacagccgttacccaggacctcctgaataaggaaaagcttcgcaccatgtttggccgcgacaaggtcaagaatgtctggatcgcaaccgataccaaggagctcgaggagaaggtcaaggaccgcgatgctgctgcgatgaagctcgagggtgcggagaccaagctcattgtgcttgctaataagacgcgcagcaaggctcttaagaagaaaggctcggccgagaaccccgagactgacattggcgatggccagtttgatgatgagtctggctccgtcgctgctcgttgggtggaggctaagaaacgacccacacaccgtctcacgatgcttattggcaagaaggtcgacactatcaattgggcgcgttcggaaatcgagcgtctctctcccgaaatcgaggagttgcaggcccagcaccgtgctggagaaaccaagctggtctcctccgtttttgtcgagttctaccatcagtctgatgctcagtcttccttccagtctgtggctcacaacctccccctgcacatgagccctcgttacattggtttagaccctactcaggtcatctggtccaacctgcgcatcaagtggtgggaacgcctcggtcgctacgctgccaccatgagctttgtttgtgctatgatcatcttctgggctatccctactgcagttgttggtgccatctccaacattgactctttgaccaagatcgttcctttcctgaagttcattgacagcgttccgtcatggattaagggtgttattaccggtctcttgcccactgtcatgatggcagtccttctggcgctggtgcctatcatccttcgcctgatggctaagttcgggggtgcacctagtctaccagctgttgaactgaccgtccaaaactggttcttcgcatttcaagttgttcaggtcttcctagtggtgaccgttgcctcatcggccaccagtgtcgtcagtagtatcattgacaaaccctcgtcggccgcctcgctgctagcccagaagatccccaccgcgtccaacttttacatctcatatatcattctacaaggattgtctttcagcgccggtgctctacttcagattgtcggcctgattctgggcaagatcctcggcagattactggatagcacccctcgcaagatgtacacgcgttggtcaagcttggctggtctcggatggggcactgtctaccctgcattcacattgttgactgttgtcggtatgttacacgagtgatcgatttatttgtttatgacactaacgtttctcttagcgatcgtctactcttgcattgcaccgcttgtcatgggcttcggtaccattggtctatacctcttctatttcgcctaccggtacaacctgttgtacgtgtcgaactcaaccatcgacacccagggtagatgctacacccgtgctctgcagcagctcactgtcggctgctacctgtccatggtttgcctgattggtctgttcgccattggcaccggtgccaatacgatggctctcggtcccctgattctgatgatcatcttcttgatcttcgtcattctattccatctctctatgaacagcgccatggagcccctcctaaactaccttcccaagaacctcgaggcagaggaggagggtctgctcgccgctgagaaggccaacatcagtactctgaacgagaactccaagaccgatgacatgtccggtcccggtggctccatctcggcctcccgtgacagtggcgtcgccaacgtggacaacagcctcggcagcgtcgactccgccgagaagggtctcaccgagaagtcgccgccagcgcccaagccgaactttttgaccaagttcctgcgtccggacctgtaccataactaccaccagctgcgcaagttggttcccagctcctcggaaatccctacttaccctgctgaggtcgagcgtgacgcctactgccacccggccgtcagctcgcacccccctcttctctggattccccgcgaccctctcggagtcagcgcccaagaagtcgctcacacttctcgtgtcattcccatcacggacgaggatgcctatctcgatgagaactgcaagatccaatggaacgaggagaagggagagccccccatctacgaggagaaggttacctactaagcgccctctctacttgcgcgatctcgatctagttctctattagagtgtctagccgatgctctgtctcaccggccggcgaatgcaccgtgttcatatatcccttgtatacagacatgccatcgccgacctggtttcttctgtgatacccggccggctagtccacctgactggctggctataacccggccattttgttatatttgtcaatctaagattggtcttgagcttatgtaactcccggacctttcgcttttcttttctataatctcttaaaataatcaatttccacttcgcatgtcgataatctatgttttgagaaagttagccatggaattggaaatcttgaccatcctccactattctttttttttggattacttattgcatggtttttagccggccacttttggtcatggctgcaaatgatatggtcaattatctatctttttctctgattcctacgcagtcccttactctatttccaagtaaatattcttctttgtctgcatgtctacataccgaagtcatagcaaaccaaagtcttctattttgagcaatgcggtcattgcgcgatccgatagcagttcgtcgaactctcccagttcctatctcagttgttcggatgaaatgtgctatgcagtttcaccttgttgggctatagcgtatgtcttcgcggcgccttttggtcacacccatcggtccagatccaatgatataccgttggctggctaagtggccggtgtgagaaggggttctcaccctattctcacccagttctcactcagttctcaccttgctggctcgtcgttgctgctgcgatgcggttcggtacctccgctagatggggcgggccaccgtcgggcaccgataattggtagattcgcagcccctaaaacagttcaaggcagttgaagatgagctcgaagcacaacaatgcccgcagaaggctcgacttgatgccataaagcagtgcaccacactcgaaacaatgtcgtgctcgctgcctcgcggcgctcagtgcatgagagtataggggcacctgtcaccaccccgttctgcaacaatgctctctgggtacattgaagaactctgactggatggtttagaaacgccaaccttacaaacgagggagggacaatcgtctgcggccgaatcgacgtgggtatcgtatggaccgaatgcccaatctagctccttactagatacaactctgggagttcgttccgtgccttagtcggtgaaatctcctgtttgtaagaacaagcccatagaattgaggcggagaacgatagtacggaaatttccgattatacgttcatatagcggactcggcgtgcgcgactgtggttcgaacacctggcaaagttcaaggtctgtttcgatctggggtaaagagacgttgcggaatttcatgagcctagatattgcgatggtgggggtatgcgcgtcgatatcatgtagggagcgcgggcgaagtgttcttgcgttgggaggcacgataagatcgttcgactctcttagaaacggctggtaagatgcttgggataggagtatagttgcagtggtccttaagcctcctatcgtgtctgctgtattttgtggtctatgcgttgtgaagttgatgtatggacgcaggtagacgttgtcggtagctacaatgtagttaattgataactctgggcatgtaactaagttagttatagtttaaggttatataagtatctgactgcacataaaccaggcaagatggaaaaaggaagaatataacattcctatctaactaggtagtagtataagatattttaaataccctttcaggtatcctttcaaagatcttttcaaattgtcccttaagatgcctataaatatctatttggaatgatcagtggcatactgatgcacaattcctacaaaaaggctttctcatacatgataccaatatgatagacacagccagcacatcttatgggacctagactacccgttttgatcgaagcaatcatgatcctggtttcatcgtcggttcaggaattctttagatgaatctctcgtgacctattggccattcaacctttcatccgataatgtggaagttaaggttcgctggtttgccttgaaaacttaccacgttgaggtatatcggggtcatcatatttccataaatgcagcctctttgataggcaatttgcaacgactgcaccatcgagtgacatcagtgttctcgtcttcgtcgccgagtgtatcgaaactttcttcacaataaggtgtagacagtccgtgataatagcccgtcgcttgactcgtggggaagaggcgtggattagaatttaaatgccccacaggtgtattacgtagacacgtacgtacatctatgatagtccatactagtgtagagcacaatttagtgaattgcactgttctaaagtcaagacatcgctatcctaacatatagataccatctcaaatgtttatttttctcccatgtagaaaaataagtctttcatcaagatcaacagatcctgattctaaacctgattccaacatgacaatggagaatagtacctcgaccatgaaggagcataagaaaaaagaggcgggataaccacccgctagagcaaaaaccaaggaaatcacaaactaaaaaagaaaacgtaccaagaagagaaaagacatgcaacacaaaacagaaggaggccatcaagacatcacgttaaaggaaccaaaaaaaagtcacacacatcgaggttggatccgaagggtatcaaggggaagggaaacacattttgcgacaggacgaatggcaagaaatcggacaaaaaaagaacaaacagacatcatgcatacggacgaaagatcacagaaggatcaaatagttcgagggcgcaatgcctgtatctccattttgcttccgagcctgccaccatcggccgctcacatcagatacttccaagatctcgtgcttggcgaagctgatttcgttggcgtcttccgggttggcgtcatatgagtagatagccttggcgcggtaggggtagtctgttggctgaggcacttcgcccacttcttgctcgccgttaccgggagtctgagggttgggggtaccgaatcgaggcgcagaggaggttcgttcggcgccgggcgcaccgccagggtacccggagacaggggacgaggtctcgaagccgccaagttgggcggaggtgtacatctgcggggtattgctggttgccatggtatctgggcgggcgccgaatgcgctggacatggggcgactaccgcggtaggagggctcggcgggctgttccttgttcagggcgaaggagtcgatgaagccgcggtgagtggcctgcggtgtggagccgaagtagaagatccagacgatgatcatcatggaaagcaggatgaagcctgcgccagcggcttgcatggatggttggtttccgtagatcaggttgtttgcgctcgtagatgttaggacgaggccacaggcgaggtaaccgacgatctggagatattgtcagtactggaggctcgtgttatctgtattcaagagtcatcataccgccatgccataaacgtggcctgtgtccgtggcaaaggtcgtgacgaggcccacaataacacagaacatgtatgagatggcccaccatgagtagttaggatattcggttttcaaatcggcgatgatagatgcgatgagagcaataagccatgccagctagaactgtatgttagtcaatatcgggtcatagagaaagtcgaacgaacaattgaaatcgagacggtcatgagcgcgaacggatcgcctaggatgttgctaggccggaatttgcccattttggcggatttattggattgggcttgtgtaaagggaattgatatgagacgggcgaagaaaacgagggaatggcgatgagcgacgtgctttgtatataagagttgttgttgattgttgggtcctaaacgaggcggacgggaaggagtgactgtggttagttagtgtgggaacgacaggcgtgattgcatgggatgtggcaatgaattatgaatgcgacagtttataaaggaagcccgacatcatatggagtaggcagatataggattaaagtaccttgaaaccgaagtggattcagagacaatccgtggggatgaagaggttgggaaccgaaagaagggaccccttacagagaggcaaaaccagcaccaggctgggataaaatgaaagaaatgagagagggaatcaatgaagataaaagagtggataagattgaaggttgaaagagaggagagagaggagaatgatggaaaaggaggaaaagtggcagatacgctgtggagtccgggtcccccctggaaatcgacggtctcgattcttgaaattaaggaaattaagaaatttcaagggaacaagttgacttggcgggattataatcttataaggtacatgacaattaccttggtcgtttgaattactttatctcttttgattcatcgctaattataaaacaatgaaaatagacttgatctggtacaaatctataaatatccctaaatatcttagtcacctccgctttgtgcacggccatgctatgacttttatgactataattcgggacatctgaagtgtcagaaatatttcgtaagtccctatagaacattttcggtcttataggataacaactaacacattatacagcgacttcagttcgcaaggtggtcaagacgggtcagcctcatcttgtttttctgtgaagaattgcccggaccattttggtttctatactcatgaaatttcgaatactaactatactccgtacaagtacatacataccgagtccgcgttgatcgcatctgatcagcacgtgttagacatatggatgattatactatctaatctatacctacaccaaatctacagatgtctgcccgtagtacataacagataataagtatactgtaaggagtgtgttgttggtaccacactcgcgttcttttccgaatcgggacaaaccttaagaatgaataccaaatccgaaggatcataactatcaaataccaccctaaaagtcgcgagcttacgacaaattcttgctcagcctagatgaaccatggatcctagataaaatagagtccattgtatcaataaaaagtaggtttaaggtagaaaagaggcttagaagtttatccagggcccaggggacaaagcctaagactcttaagagttgctcgtgatccaaggctcattttgtcgttaagaagccacgtctgcataccttgaaaccatatctacacagtactgatggattatgttcctcgctcatgatcccacagatctattaagacagcagtatcgtcctcaggtcctagaattactgtttgctattatgccaattaaagaaggatgtagcctctggtagcggacaatatggtgagacaattgacaaattagagttctcttccgattagacacattagacgcaatttggaggccagcacaatgttattaatgccttgtaaagtctgaaaacaacatttgaagagcaaaaatagaataaaaaataagtgaggctgacccgtctcgaccagataaccttgcgaactggagtcgcacgcgctaccaattgcgccacagccccaagttggtgacatattttcgtgaagatttgccctatatttggcaccatgggagtcaaagatgtatctgactttttctcccccaaaagaaaaggaaaaaaggagaccgaccatagacattcacaacaatgataagtttgcagtatgcagtcaatagtgaataacaagagtagatgagtagatgagatatactccacaattattataaaaaaattggtactatagtgaaaaaaagaaaaaaaagaagatgaggctgacccgtctcgaccagataaccttgcgaactggagtcgcacgcgctaccaattgcgccacagccccaaattggtgacatatttgccgcgctgtggctttatgagcattggctctcttaactggatttaggcatgtatgattctgcgtatatacttcagcgctaatgacttgttcgtgttagccaaccaacgcacagcatcatatcattgatatacataggtaacccaatatcattgctaacaagtcaccagtcaatatacataccttttctgcatcaccaaccacagtttgcgggggaagaatccggggtagattatcacattccaattgaagtatggaatgaaggatatgatatacatgaacaagttttacatgtgatctaagctttacatatgccaactcggcttggccgagctggatatcatattccctcgtatccgcagatgtacttgaatatcaacgcacatacctatgtacgtgtgtgttgtagattgattaatccctctattttaaacttggaaatatcccatctgcgctattcaagctaaaagcacggtacgccaaaatcagaggtatcatagcaaaaagcagacaaccgaaacaaccagaggcatcacactcctccagctcctctccagaataacacccgaaacaagccatttcgacaagattcgcctctaaatttcctcctccctgccctgcctaacaacctctttcctcctaacctccctctcaacatcctcaagtctcccctcccattcagcccagcactccccactcccaacgagcccaacctcataccagcgctgcagcacgcgcgctgtgcgcacccgcagctccgagatctcagcagcctgctcactctgtgtctgcgcgagcctgtctaactgtggctgtaggtcgattagtgctgcggagctctgcgcgtccggcacggggaggtcatttagcgatgtaaggcgcgaggcggtttcggggaaggcggtggcgtaggagaggactattgaggctagggtttggtttgtgaggccttcggggatttggtgaggtggtgttgtttggaagagatctgggttgcggtcgtctaggtggtttgtgttagtatgaattggatggtttggagtggatatttcagaatccattatccaggtatcagaaatgcaattcaaatagcgagaagggtatgagatgaggggacggtgtagtggtgaagcgcgtgtaaataacattaacactggtcggtgacatacggagttgtagaacgtctcgtacggctgggacccttcgactaagccgttctaattctgattctagccgtacgagtcggcgggagactgtctcgtcgagagatgcgggcttttcgggcgtggtagggacgccggtccagtctgtggcgccggtgaggaggtaggcgaggcggcgtaggcgcgcctcgaggagttcgatggtggctccggccagtgcatcactttcgagggccatggcctatggaggtcaaagatcaatttggggaattgtgggaggaattaacagagaaagggtgcctgaagcttggtgaggtgcaaacatggcaaaatgtggggacaagcttatcagccgtagaaacctcctgaggtcgatgtagacttttttatgcaagactatgtctttttaatatgggtttcttcacacgagaccgatacttaggagttgaataggagttgagggtttattacaatctgatatttgacatatctcaagcttgacattgctctacagtatctacacattcatcactcactcattattcatgtgcttccttctccgcatgcttcattcaatctacttcgcatgcttaagatgatttgccatttcctcatcatcagcactgttccacgctaaatccacttgcgaggcagtgaacgccgtggagttatttgcagtggcaggatggcccaagagactcgctccatccttctcctgcatctcttggctgggctttggctcgtcgtcgaacgcggagacctcgtagtcaaaaacattcacctttgtggacttctctgacatttcaggctgctgttctttgggctgagtttccacgttgttcggctctgcccagggatcttcctggtcactaaagattatggtaggggtattctcgaattcgcccccataagcatcattgtccctgttcacgaagcccttttttcggttagccggggaccgcataacgatctgataacactagtgcatcttacctgaagctgtgacggcgcaggatccacttttgaattcactgcattctcgctcgcataaacaagtaagacagaactccactcttcacgagcggcttggaggacttcaatctcctgaactttccgaacagtgtagccaacaacctcgctatcctgtgtagctgcagtgttgccttgggcctttcgtttctcggcttgtcgtgtttttccatcttcccctgagaagctgatacgccaccactggtagtcattgttgttttcggtctccgagtccatatccatcaagtgtcccggagtagtcgttctaggacttgataaaacataagtcacatgcggttcagtgcatacacctcggagtgtatacttgtggaaaggaggctcggaaggtgatttgggaggttcgatgagtgtctttgatatctcacgaagagactccatggcactctgctttctaatttccagttctgtgctcatatgattagccaacagtatgagcacggcagaaacggctatcttcacctttgagtttagcttctatgttcgtagcgattgctctcaattcctctgcaactcgcattgtctctgcacctgccgctcctgaatcagactgatcagactcgcccacttgctcgggtgtaaccactggcaccgcctgggcagcttgttcgaggagttccgtgatcgtcgagttgcccacggggtcccgtggaattgtatagcgatgtatgagttgttcgagtttcaacacatctccctgtatctgttgtcgttttgcacggaattcacgggagagatctcggcagctgctaagataccgatctgggtagaacacagagtgaatatccacaccaacagcgtttggtttttgaagagcatcaagtctaatgactagcacgtctgctaagtgttcaagccatgtgtcatcaaattccttccccggtctgtcagaccataaagctgaatccaaaacgtcatagagcgtttgatcattgtcctgctcaacaggaggctcaaaagtgaagagttccctggtgatgggctcaacaaactcgtcgaaagtttctctcttgtatgcataggtcgtgaatatggttgtcagtggattttcaggatctgcctggatggctgcaccatgccacgcttccaaaaacctggtgacaatctcctccgaatcagccgataaggatgacatgctattgatttttgctaagctgtcgctgctgccaaaagcacgtttcgtggtatccataaaagccatcaagcgctgggtctcatgaatgatatcgtcccagtcgctatccccggtcttaccatcattcaccgtgacaatcttcggcaggttaattggttgcccgttccaccactgcggctcatggccgtagtcaaacagtggtttattccgtaagagcaatgcttctcgcgcgaggggaatactgtggagaatcgtcaagagtcctcctaggtaaaggccgtcggtgttggggcggatgaacgcaggctcgccctcgactcttttgcggtcttccggatctgggctaatcatgacttcttcggaggatgtgttgaatagggtcatcgcccaagcaccttcctcgtagtgatcccgagttgctttgttgaactgcggctgtctatgcgacgtcaccccggtttcctgctgccccatgtccgaatttaatgacatagcaactgcctgctgtaattctttttcttcgcgttctgccagactgagcccatgtccggaaccttctatatggtcaagtaaccgcaaattagtacacttcttgcagttgaagcgtgaagactgtgatacctttcggagcgatcgcgacagaatcttgatacccagcgttttgttccgagtcacgtatatctactctggaaggaggacgagtgggcggtgccgtcggtggcattggtggcgcattgtcttgttgagcaaaatcccatgctgaggcggggtatgttaattcccagtccgaagtcgcataagggaggttatcttacaagagcctccgttatcattccagtaactagttattggcttggcggtgtcagatcatagccaggagttgctgcgcgtcgccaagtttacctgtagctgagaccctgtcggatcttcgaagtacgcgttgatcgctttctgtgagtcgagattgtttgcctgtacgcgatagaattagctcgattttacttatcatcccgatggcagtcctctaccttcaagaaggcgatggcttgctcgcgtgtggtgcttgtgaagctgacgaagctggtgatagcttcctcggtcggttcggaggccatgttgttgttgtctagttctgcgctgaagctagacaccgatagaataatgaataagcatgagagggacacaaaaagcaaatagaacaaagcaaatggggacagaagagttggggaagagaaagacaaagtgtcgcaactgagcttccccaccacatgacgccaagcatcattccgctatttgcgtctctttgtacttctccttgtcctccctctgcctcgattcttcacttctttgagcctaaaatatacaggattggacattctcgaacatttcttgcattccatagcctgttccaggtttatcaaggcccatcggtcggactagttcacgttcacaatggatatatatatttttctggaactgattgtctccctttcaagtctttgaacggcctactctgggtcttacaccacaatactatttatggttgaaacaaaacaatgcattagtacaatagctcttgggctgtcggtccgagtggatataaaaacccctctattccgcgccagataatcattcattacactttaaacaacacatcatctttcactttcacaagctctcgaattttctcatactatatagttacaatggcctacgtaccccaaatcacaaataagaaagccaagaaggtcaagacagtcaatacccccaataccaccattaagaagaccaccaataggaagactgccaggaagagcgccaataggaagaccaccaaaaaggctcccaatcctcctgttgatcttaacaagcttttcccatcctggggctctgaagacgcactgaaccagacggcaaataaggaagctactgatatcattctagccgtgtaccatgacatcaatgcctactgcaacctcgagagacatgcgagaaacaaagtttacggttctcaagagacgttctacaacctgcttgtcttcacagaaggctttgtggagcgggaaatcggctactacacgtcctgcgtggaatcattcaaggcggaacacggtgagttccaacctgtcacacctaatagtagattcttagaattcgttactgggctcgggtggaagatgtttgctatcttttcccatgccgaagcattccgacggggtatcaaagaagccgacgataggacctgggggctcctgctcgagaagatccacgaaaactccatgagtattgaactttatgcgcacagtcgtaccctgaagtggcgtaatattcttcaggtctaccaggacaaccccatcccaggcctgccagatatgaaacccgaaatcgagacatacatgggatggaaagtcgaccaccctcatcacacggtcatcacgcttgatggcaagctaaaggaacccacatacaatggcaagttacagcaacacatcaacgagagtatctatgatcccaagaagtggagtggtcagaaacaggacccgacacttcgcaagaagcccaatggcagttcaaccaacgtcggacgcaactgtgttctatgcggtagccctgtttcttgtgactgccgcttgaaatctcgggcaggagaactggttgagcttagagaatacaccgagaagggtactggtgtccgagcgctggcgagattcgggcgcggtgatattctcgatatcttcatgggtgagctccttccccaccccgcagaggatgtttatcctctaacacaaagcgacgacaaattgaagttctccaatctgtgtacaatttgccctcaccagtttggcaactggactcgttatatcagccactcgtgccggccctcgacgcaattcatgactcgcaccattggaaaacgagttgtgtgcacggttgaagccattcgcgatattctgccattcgaagagattactgttagctatggcaataagtactgggagtctgtcggctataactgcctatgcggacactgcgatggttctgggactgactagaaatagattagccaactatatattctgcatcttagagttgagagctgattttaatagcaaagcattgaatagacccttgatttattttatttcaacgtattaatgtaggacacatgtagtgtccactctagtaccaaggtgatagggtgatgtagttcctcgggtatccccgcagttctgggggtgcggggaaagctatactttccgcggacttactccgccttttgcgtccttttctccctgctgttctaaatcccttcatttggagaagttgactactacctatcgcattgccctacacgactgatacagtcaatttcagccctcaagtagtcatgaaatcttggccaagctaacattggaataaaacatgagctacagcggaattatcacggggctgagccggagaggctgtacatcctgtcggaagtgtgtgcttggaggaaagagtgtccttcagcaagcatccttggtcaagagaggactgctgacggagagctatgcgcgggggccatcaggtgtaagtattctctatctaagaacaaggaaataacagtatttatctgaccgtattgctttcgatatagccgcccttgattgagtccacagttggggaccatttcgccaagattgtcgcggaatgcggagatagaacagcgtgagaaccgggacgcaaaattggagaattaagactggaaatattaactatactgtccagtgttatctcgagacaccaaaaagatcgagctacgtatgcctccttggacacaagaagcaatgccctcgcccgggggctggaatcactgggcgttgtgaagggggagcgggttggagtcatgcttgggaactcgattgaatacgctgtggtacgttgcgtgtccctaaaaatggttgagaagagaagaacaaggcttacatccgtgagcaggcaacatatgcgttattcaaacttggcgccgtcttggtaagtcagtccgctcattgtagtaagcgacattgtatctaatcatttgataggttccgctcaatccgtctttcaatactgcacaagtgattgcggccctaggtcacctaggatccggtcatcttctaatcagtacagagtccaacctgccccgaaaacaaccgcgcagtaatgttcccttgctcaacgacattgttgaagacctccacaagtcaaacctggagtccgcattggtcccttctctgaagaacatcattatggtcgataactctgaaggccgcgtggatatatcttcctataaaagcttgacgccgtatgcatctattgtgtcccagcttactgcagacggccgcccacttcctccccagaatctctcgccggatgaaactgtgaatatccagttcacgtcaggaaccacatcaatgcccaaggcagcatgccttacccatcgctcaattctaaataatggctctcagattggcgatcgcatgcttctcacgccgaatgatattgtctgttgcccaccaccgctgttccattgcttcggcggtatattaggctatatggcaacagcaacccacggctcagccatcgtcttccccagtgaatctttcaatgctcgggctgcactagaagctgttcaagaggagaaatgcaccgcgctgcacggtgtaccgacaatgttcctcgaggagttgagcatgatcgagatgggagaaatctccaaggagggattccagtatcttcgcacgggaatcgctgctggaagcagtattccttccgagatcatgaaaaaactacacaaggtattgaacctgaccgaattgacgatttgttatggaatgacggaaacaagccccgtctcggctatgacaacgacggatgatcccatcgataagcggatctactctgtcggaaaactcatgccacatgtcgaggcaaagattgtggaaccgatggacaagaaagagattctccccatagagacacggggtgagttggcagtaagcgggtacctgctgatgaaggaatactgggatgatccagaaaagaccgcgcaggtgatgataccagatgagtctggaaagttgtggatgcatgtgagtctaatcatctattatttgtctcaagtaatgcgaatttctctgaactgtgcttttagactggagatgaagcttccatgtcatcggatggatatatcactatcaccggacggatcaaagatctgattatccgcggtggcgagaatatacaccccctagagatcgagaattgcttgctagccaacgatagcgttgcagatgtgtctgtcgttggcgtccccgacgcgagatatggcgaggcagtggctgccttcgttattcctcgggaccacggcttaaaaacagtcactgctgaggatattcagcaatgggtacgtgagaagcttagcaaccatcttagtaagttataacccagaccttgggactgctgcatcctttccatcgtttgcagctggtcttcggtcatcctcaaaattgccatatagaccgagctgatgttttacttgcgtatagttccgaagtatgtcttctttttgggccctttggaacctttccctaagacagcaagtggaaaaatccaaaagttcaagctcagggagaaggccattgcacttttgactaagagcgctgcataaatagcgagcatacaaggccgaggcctgactttgcatagattctaatggatgagtgcctgatttctgtacatacttagttattcaagccttattagatagaattgtcgtatgatcaaggttaaattaagagcctgaatagatacattcatactgttgccagattaagattcaaagtagagtgttcgctctgaagtgaaccctggatcatcagaaatggacaacagacaagtaccaagtgcaagagccagtagttgaagcataaacctagaaatgttctcatggcaacatagagttttccgcgatggtgtcggtgtgagtacctgctttctttcaggatatcaagtcgtggtagccagtggccatcgcggacactttcagacctgccacatcttaatgacgaacacgaagctgtcgatggggtaggtagctcgaaagcagtatcaaatccctcttctgtggctttcaagggcgggtcgtttcagagatagcgcagtgatgtcagtcagaccagcacgagtaacatgtataacatatcatgtagccagtgagcaagcttgctgtagcacacatctccagggcacgtgcaacgaggtttctctaaatctagaaatcctgaatgcctgtttctccctggagatttgggcgagcgccgtcctcgcaagtgccgtcaaccacccattcaggctcctcatcctcgaaatactggtcttgctcatccgagtgatcatcatagtcgtcattttgatcaacggtctcgtaatcgaaatcagagtcattaccctgcatgaaacgcaatcccatctcccagcgccagagccgctcgccttcctccttatttgggggtatttcatcacggtcctcagcaaggatctccccatctgggccgcgagtataggtcatcatagcgttagggtctgggtttgatatcgcgtccatcttggcttcagatcgcaggagatcagtctccaggacgcctgaaaaccccttggctcgcccctcggcctctctttcttgtgctgtctggaaccggcggatgaggcgatcgtataataacgggtctgcggagaagtcgattaggattagcattgtgttttcttgttcgctcctgtatgcaaagccagctggcaccagtaataaaccaggccagataatttgtaaaatgattaactggcaatgggagagaagagatcaggcggaccggctagctcaagccccgccgagaagtattctgggtgcaagtccagataccgcttgcgacggtttttgactgtgacagctttttgtgcgctagacgcatctttggccgtaaacccagaatccttggggaaatgtggcatctttggtgtgtttcagagtgtggagatggataggagaggagaatggaagttgggaacgcggagctcagcggcaaaagtgccttcacctccgcaataacttttttctcgttgaagaatattttgagatgtatctgctttgaacgtgtaagttggggatctcattcaaaataccttttcattattctatggatgtttttttggcaataagggggaaaggacacagtttcaggttgctaacaagcctgcagatgcgctttctaggttgatttcccgtatatccagaactgcatcagctggaaataatgtccccccaggacatgttgcggcacattgatgcccggcggttcactaccggtgtggttttgctgatcctgcttgccttctactcgcccctttcgaagcttgtcttgtctccaacatatggatccttccccgcgcatatcttccataattttggagtggccatctccggcggaatcgggtggctactgaaggacaagattctcaagcgcatgggccgtctaggtggctttatgctccctgtgttggcattctgggttccgactctccagtactttatcaagcagcaaagctctaagattggcaaccccacaggcccagtggtcacagaactttgtggttactaccctctggtgctgttgaccgtcgcctatgccggaaagcaaatccagactgctttgagactcgaagcgcagggcgacgtgatagttgagcatgtgcccctgataggtacatatatattctattcggctggcgaccacattgcccaatatgttctttcatggattgttgggacctcggttattttcaccagagttggcatgcaaatgcttctcgcggcctgttactctgtgctcatcccatcaaaatggctagtcctggccattccctctatcattttctcagtgacttcgaacgtacatttcgctggaattagtggtgtcaattccgcgattgagcacgaaggttattctcttttggcacgacaggaagcttacactgggtacatttctgttttggaaaaccacaatgaaggattccgagttatgcgctgtgaccacagtctgcttggtggacagtggaccaagctggcaccaggctaccgacctgaggtggatgaccctatctacgcagtctttgccatgctcgaggctgtccgtctggttgagccggataatggcgtttcccgcgttgacgcagacagcaaggcgttagtcatgtaagaattatgcaaaaaggatcgatcgcccagtttactgacagaaaatagcggtcttggagtcggcacaacaccctctgcgctcatcaaacacggcattgaaactaccatcgtcgaaatcgaccctgtggtgcacaagttcgccactcaatatttcaacctcccgccaaaccacatctccgtgattgaagatgccgtaaaattcgtcaagaaggcacagtcctccccgaatacaccccaatatgactacatcgtccatgatgtattcactggaggcgccgagcccgccgatctcttcacatacgagttcctgtcaggccttcactcgctcctcaaggaagacggtgccattgccattgtgagtttcatcaaggcaacaagccccccaaatcaactccagactaatgaatggaacacagaactacgccggtgatgtggccctctacccaaccggtctcgtcgtccgcaccatcaatgccgttttcccatcttgccgcatcttccgcgaagaacccactggagatgacgaagataccgacttcaccaacctggtccttttctgcaagaagagctctaacacaccgattcaattccgtgaccctgtcccggctgacttcctgcgcagcaagtctcgtgaaagctaccttgttcccaagcacgaactcgaccctgccatctttgcctcttggcccaagggcggtagaccaattttgattgctaagcaggccggaagattgcacaagtaccaggatcgcagtgcgatcaagcactggtctatcatgcgcaaggttatgcctgatgccgtgtgggagaactggtgagtgttgaaagggagctgagtaaaattcgaagatcgaatattactcttgctctgacttttatattgtctgtctatattagaagatcataggtaccaaataatagcaaactagcctacaaaaacatcgccttttagatctactgaaaggtacatacttgctgtttcgtccttcgtattgctggaaagacacgtagaataacaaatcacagacttcatattggtatcattatctaacacctgccgacaagccagggagctccatccactgttagagtaagcaacagagcaactgtctccccttcacaaattcaaaggtcccccaagagctctttcatctccatatatcaaaccacccagcccatcaccaacagtgagagttccggcctctgtattatgtacgcacaaagaactaaaatacagtgagaaagaataaatcaagccgaaggactgccacggggactggagccaggtttcttgacgaggccggcgaagaagttcgccagggcttggttgtgcgctttctcgtcattgccagcggtgcctgcatatgggctctctttctttagggttcgactagcctcgcggtcctggggtaaaatttagctatgtcctgggttggggtgatgatgccgcgctggacgggtgcttacccgaagctttttcaacatatcatcggcgtccacttggattccgcccatgttgaactgtacagggccgatgtggtcgttgactttgccttcgtcggccatgggagacatctccagttgcggggttggctggtttgaattctccttctcatccttggctttgagatcctccagtttctccacttgggttgcgaagaattcttggaggtcggtggtctcgacttcgatcttggtcgtgttgccgtgggggttggatgtgcctcgtttagggtcattgatggtcagttcgaacatggtcactgcacttgtgccttcttctgctacgccgttctcgccctgctggttgtcgtctgtggattggtagattgactcgggagactcctgaatctcaattgaccacgccgtcgatactccctccatgtcaaatccttcccgaataattcggatcttaccccatgagtcccagttggctggcactagaatcttgtctcggtcgatcacattatgctttaatgattctcttttcaaaagagagtgtatacccagagaagaatgaatcaagccctgaagagagtttgcaaggaatggggtagtatagatgagcgacgcgccgtctgtctagaggtcagaaagagcacaaatggccaaacacaggataataacatccttacgcttcaagagaatcgttctgaggaattggagaacgaaatcgaactgctcttcgtgccatccgtgatctttctctaatttctcgattttatccgcctgagaacgtcgcgaagtaaagtcagcaaagatttaccagcaattgatctctggataagagtttacataccccttggcagacaacacacattgggattccgaggccctcatcccattcaccgggtcctagaggtattgtgaccggaccgcttgaggttgaaatgccgcctgcagccgcagagctgggatcaattccccttttgcgatcgcgccattccgtcatggtctcttccataacgaatttggtttcatcgtcaagcgaaacgagcacagaacgtagcagacgggtccattctcttagcctgcgaacccacgtccatgggtctgaccagtccatcagaatgacaaccagcgtttccgggacggacttgggggtcaaaagtggtttgaggagaggtgcgaatgacggagagggctcggacaagaggtacgccgagacgcgtgccagggtatctgcgcgagagaagcatcagcatatgcctgatcaaagagtgcattctccgtgtaccttctttatcagcatcgaggacatctcgatatgtgtatccaagcgcaaattgattggcaattggtggtgttttccctttacctttccgcttgtcgtttactaagctagggtctgcagaggtgtccgcggaaaaagtatctagaaattccctctggctgtccggcgtgccacctatgatcgagctattagcgacgggtccaagatgaaagacgagactagaaatgaagatgagcggcactggaaagctcggatgaactggtactaacctagcactagcaagttcttctcgggtaagcgcttgccgttggcaacagtatctaatagagaggaccaaatgttcttcttggagccatctttgctggttggccgactgctcgtcttcccgggattcggactggaaggcatcgtgtcaagtcccaccgtgcctcaaagggcattcacccttccaaatgtctgtctctaccgtagtacagcggaaatattgttcgcgtggaaatgtggaggcggagggcttgtaaggcgaagcagcgttgcgggtcaggggaatcccgagggagatggataaatgtaggcccaagtgaaacaaccctaatcgcgaagggatctccgattgcaagtcacaaaaaaagaggaaggtctttttctggcacgtcgttgagcagggggctagtttgcattgtaaaggtgcgtctccgtaaacaattgattattacggttcagcgcgggctccacatttctttctctccaacttctgccacaccttgaactattctcccgcgcacatttccctccatgaattctattcgccaggtccaggcgctcaataagcgcgagcttgagcacgcgatgtaagtagaactcatgtgaagctcccgcaaagctctttttcccactgacagtcttacgttccacctatagacccccagaggcatcatggcatgcagattatcgcgacacagcctatatctacatcggaggacttccatttgatctatccgaaggtgacataattgcgattttctcacagtatggggaaccggtgcatgtcaacctagtccgcgacaaggaaacaggcaagagcaagggatttgcctttctgaaatatgaggaccagcgcagcacagatcttgctgtggataacctcggtggcgcaactgtcatgggccgtttgcttcgagtggatcatgcgcgctacaagcggaaggacgacgaggaagagcaggacaatgtcgccaagctaatgggagatcccggcgtcagtgagaacaagagcaaggaggacgaccggaggaggggaaccgcaatagaagagaggcgacctatgctgaaagaggaaagggaactggaagaattgattcggaaccacgacgaggaagacccgatgaaggaattcctcattgaggagaagaaagaagagatcgccactgcaatccagctgtggaacagcaccaagaagtcgtctcgacgacgcgatgacagcagagaacgatcaagccggcatcaccgccgacaccgttctcgttctcctcgcgagcgaagacatagagatgatcgctctatggatagggagcggcgatctcgccgtaggtcatccgaaagaggagaaaaatctaaaagggaccgctcgccgaggaaatcgcgctcgcccgaaccccgaagacaccggagtgatcgggatagacatgatcgccgccattgaaagataaatgagaaatcgttataaaggtttccaacgttatctacggtgctacacatatttctcgccgaaattctctccttgcaaattgggacaccctgaccaaataagagcgtttcccagtccagaaagcgatgccatgattcaagcttgatgctggcaaagagctaggtgctgcagacaaggtgttcgttacttgctggacgatagactacacccttggtgtgacagaccggggattttccttttgtcaacccagataccttttccagccatcccgcagacaatacctctttccttcctcgccatctcgaagcacaaatttctcccagcgcccttcttttccagatccgactaccaacagagtctggtcatcgcaccagcctatgaggcctttttgaggccgaccaaatgatgacccgatcggtggcacatgcgccgagccctggttggcttgctcaccaatctcaaaatgtgcgttggcaaatgaataaacatccgagaacacacgaggaagcaggggaatcttgccaaggattccccatttgtagctaggaggtgtttcctctaatgctggtgatggtgattgactgcgacgagtaacggattgctggtgggggatatcaaagatgtggagagtcgatttgtcagatgtaactgccagcaaagtattggacggcgaaaaggcaattgagaatatcactgcgtggtcaacaccgcgtcgcaattctgctagcttcgtgcaatttcctgtagcgaatatacgaaccaaagtcccctggatagatgttaataacccacccatagatgatcgcagcctaagataacttacggactcacttgcagtcgccagcaagttcccatcgggacttagggccatagcccgcaatggtgtgctatgtgcaggtatgatgctgatgttgccggtctccagctctatcatttggacctggccgggagaccgaccagggaaggccagcaccttgttatcgagacaggctagccccaaagggttatcggaggtttcaaagactgagagtttctggggagggttggagaatgcaaagacatggacgctgttcaataaaacagcgacgatttttgttttggagagacggacaccgagcacggaggtgcggaattcaagtgtgatggcggctttctgtttggcatcgtcccatataaccaactggggatatctgtgagcttagatgctcacattatgctagggataattgcctaccttattctgtgggaacttggggttctttccaccaccgacaatggccaagtagttcgactgaccaagcatttccgctatcccgatgcctgcgttgaagtcttaagtgcaaataagcgagtcaaggtaagtgacttgatattttgtatattcacaacgtgtagatcaatcgcttacctctcaaaaccttgagctcgcaagggttggcgttatatactgttcgggtcgttcatcagcctgggttccatagttcataatatgagctagcttctccctaggttctcctaatagctagatcaagcgttcctcaccacaaaaacccgtgtccaagcccactgagaagcagctgttatcatgattaaatgttgctgagagtgaatatggcccggtggactcatcgatagattggcgggtattcattgctgtatgtcaacgaagcataggaaataatttcttgatcagatagatcgatctgggtagactctgtatagtaaagtcctcaatcggtaataaatagttgatcttaagaatttttccaggttcaaagcttcaaatgcttggatgtctgagatcatccccgagcttcttaatcgataagagcaatgcgggcaagatccacatcgacgcctcaggctgtggattatgtaatcatacggttgccagcagagacccactttgatcaacccctgagttgctgttcgatgtgttgctgatgggaatgaaggcgatgttgtaaatggaaatagggggaatactcggtagataattgtcaatttcctgaattcttttttttcttttttcatccactcatcaattgtgactgatcgaaagctttgtagaagtaaaaagtagctggagaagaagagctgtcccgtgattggccacctatttgggaaagggggaaacacgaactgtctttcctccccccccctactctctccagactctcaggagaggcaagtttcaaacccttcgtcttcgttgttaattccttgctttggacttctttctcccgctacacttctttaatcttccctttactcacaatgtcgtcagccctcaatgcggtatgtacattccccttttattgggagcttcccgccttctcttaaagcttcccaagctaattgcatgcccgtacttgttccgggtagatcaagattcgtcgcaagaagaatgtcaagaagggtattcaattctgtttgatggtgtgcggcgccagtggaacaggtatgcttacaacggattactcgaatttcagggactaaccggatcctcttttccgcgacaggtcgcacaacttttgtcaacactctctgcggcaagcaggtcctagagggcaaggatgccgatgatgctgccaatgctcaccttgaggaaggtgtacgcatcaagcccgtgacggtcggtcagttgaaattgtcccccgcgcacggcgcttatatcaagctatcaatactgataccggatggcagagctcgagttggacgaggaaggaacccgcatctccctgaccatcgtcgatacccccggattcggtgaccagattgacaacgaggctaggcatgcacacacagatacccgacagatgttcatggactgacttttggatagcttcggcgaaattgtcggttaccttgagcgccaatacgatgatattcttgcagaggagtcgcgaattaagcgtaaccctcgattcagggataaccgagtacacgttctgctctacttcatcacacccaccggccacggtctgcgtgaactcgatatcgaattgatgaagcgcctgtctccccgtgttaacgtcattcctgtcattggaaaggccgactcgctcacccccgccgaattggccgagtccaagaagctgatcatggaggacatcgaacactaccgcattcccgtctacaacttcccctacgacgtcgaggaggatgacgaggacactgtggaggagaacgccgagctccgtggactgatgcccttcgctatagtcggatcggaagactttgttgagattgacaaccggaaagtgcgcgcgcgccagtacccatggggtgtcgttgaggttgagaaccctcgccactcagacttcctggctgtccgtagcgctctgctccacagccacttggctgatttgaaggagatcacgcacgacttcctctatgagaactaccgtactgagaagctcagcaagagcgtcgatggtggctctgggtatgtttctccttatactagaaattttattataatccatcggctaacaaatgaacgaacagtggctatgattctgctatgaaccccgaggatcttgcctcccagtctcaccgtctcaaggaagagcagctccgccgcgaggaggagaagctccgtgagattgagatcaaggtacagcgtgagattgccgagaagcgacaggagttgttggctcgcgagagccagctccgagagatcgaggctcgcatgcagcgcgagcagcaaagccagaacaatgccagcgaagcagccaacggagaggcctagatataccctgtcgacgatgcggctcattcgacggggcgccggttcgcaatgtgatactctaccagcatggacttttatggcaccaacaagttggcttttgtttatgggataatattgactgtttattcatgttaatggcttttttcttcttttcttcttacctctgcggggatgggcaacctcaactagattacggcactccagtcacgaattgtgggcgcaatgcttctcatttccaatgggagtctgaactatgtcgagttgggaatggttcttaccagttcctggaaaccctatgctcgatatatctcctcgcattcaatctggtgactgcctcttctctagcacatgttttccgccgtgtctaggtcgtcccatcttttttttcatttcatcacatcccagccgccaccgtgccatgttgccgcgtcatttctatttcctcctcttctgcttcctctcctgttcttgtccaaagtcgcagcgcagcaatattccctcttctcttgtttttttttcgcgttcgtgacttcttgttcattatctatttttttctcctcgcctgtcttcctaccccgatagtaattgaggaagaaaaagtacctggctagctcgcttgctctcaatttcttgttcagctactgtagccggtcactgcgtactatctgtagcagcatgctttagtttgtgatattacagctaagccgtcaaagtatttacatagcttgaagatagtatgttaggcttgcttgacccttctgtggcgacaggagatgtccagtttagggcctcactagcaaggcggttaagctctgcatagttaatcatttgaagatctggtcataccatggacggattaatgtgagccaatcataaagctcccaacaactagcaaataggtatgggggcggtaagacggctatatagtattgaggcttgaaatttcgttgctttgtgtggattattttcattatgactaggataggaaagttgtaaaacgaccgtgaaacaagatcaaatatccatgattggaattaatcacattataataccaagcttaggtctactgcaattatcctcatctgaaatgcaatagtgccattcacatcaatgagattgttaagtataacagacaaagatgcctcaaacccaaaacgatacaagtagaacgaagatgtcttaaagaacatttggaaggaaacaaagagagccatcgggagatagaaagagctaaagaagaaaggtaaaaaattttagaaagaagaaaaaaaaggagccaatgcaatagcaagaactgaaaagaaaagaaacgcagcaaaaagcaagaaagcagacacgcaagaagtggtatttgcgctccattgtacattgcgtagaaaagacggggaaacccccatttgttgtaattggtgttgaggaaagggagagataggtgtttgcgaagtagatgtggatgatcggtcagttgcagagacaacacagtacatacagccacggctttgcgagtatgatgagatgacacatgtagtgaaggacgggtgtcattaagaactttcggaagataagtgcttaatgatctgtggaaagagatgcgggcgacaacgtcaaagcggcgatgtcaagcaggggctgattgtggtatgtacccgttgaacattaggcggcggctggctgcggcttgttcgtccagaaatctaaactggcaacagtgtcatagcctcggtcatcttcataggcgtagataatctaccagatttagtcagcgcttgatcagtgaaaaagaactcccagagaaaaaccccgggaagaaaaatatggaagtaacatacctcgcgggtggaactgtgtaacatgcgaatgttcttgccggtcataaggtgtgtcaattcacttgtttcaacgtgtcgaatttcgacaaagttaggttcgaacgccagaatgtaagggtaggacagtgcgaatgcgttcgggttgccctcccaggcgatcttccagtccggacgagctcgccacccattgcggttgacgaagaatgagaaatcactgtagttgagtaggaactcgccattcatacgctcaatatgaataggtttgacattctcctttcgtgccacgaagtcaagagacgtgtcggcctggtcaaggagagattgggtctctgttgtttctagactgaccacctcaaagccacgtgcacaaccaacacatagagtagaacgcaggaagtggatggaagaagactcggcagggatatagtattccttagtgaaagtgttagtgcgaagtgaagcatgaacatggaagagagaaatacgaaccttgaatggcttgagagtatcctgaccaccctggaacattttgctgacagcagacttcttctttccctttgccagattgtccatcggctcgtagaccttgattgtacttgatagcgccgatgttttgactgaacaaacaagatgacgacccagaccaatgcctgccttgaaaaagttcgcatggccctgaattttcttcggccgttttgccatgctgttctggccctcgacataatcgagagcatccatgggataagaggaaagcgttttgtttgccagaaccaatagcagctggtactcttctaaagtgtctatttgagtgacttgcgtagcctctagaacctttcttggtttggctgttttgtctttaggccagcgttctgagacaaatatgccattatcagtcccgtagactaacttccggcctccatctggtggcagttagtgagtgacacgagttgaattagaacttttttgacgtaccaatcggaacaagacaattgattcggttgaccgctgcgaaaaagccctcgctcaggatcgtcttgttgtagaaattgctgttccgctcccacagtttgtgttgttgctgttctaccgcttcgataaactttcgtcgcgtggcgacgtttgtggcatagagagtctgctcgtaaccacccttgccgagatgcctgaaagtgataggcagtccaccatctttggcaggagggggattgttgatgacagtcttgtttgacaggagactggatgaaggtcttttggcaatccctagtcgtgggatgacctcttccatctgagcgattactaacagttctaaaggaatgggcttcctataaactcgagattcctcgcgtttattcaccattttgacgcgaacgagcaggacggcatgatcaaagagatacgcggtaacatcggagctgtcggctgtggttttcttaaatgacatcttcatgagcatttgtcgattttcttctgtgagcttcaaatcaacatagtccgcagagttgaacttcagcgcagcgttcaattggaccaaattgaaatggttctccgcttttccactttcagtattgacgcgcgaaaggaagtccttgatcagcttgatggccttcggaatatcttctttgtcggggttgccatccgcactgtttttgtaaacaccttcaagcaaaagcgggtatcttgcaagacgagttgtaggcttcgtcaaataaccgttcagttccagcttccgggattccttgagacgttccgtgtcttcgacaaatttcgcaaaggctgggttcgatgatttctccttctcaaactcatactttccgtatagttggttggcaccatatttgatgaaagggtcgaaattagggacatgttgacagaagatgtcgccaatggtgtgaacgacctggctctccttctgtcgagcattcagggcttcacatagagcgctgttgaccttgaggacctctaagcagttgccaaacacggttcgaataaacttctcacgccggtgttctggaattggcgagtgagtggtagttccagcagcgcgcaatggtcgcatccagaaatcccgcaaatattctaaatccttgacgaaatcacgctcggtgtacatgagctcaaagataacctcctgccttttcttctcgtggtcatcaaccgagtccgagacctccttgggcaccgtactaatccacagcttttggttatcattgtcgtcatcatcatccgggggtagagcagtcttggattccgatgttcccagtaccggctgaggtttcagattcaacctggcttgctgctccagtcgtcgcggacaagcaatagaatagcagagagtgtcccggttgcaagtgggagaataacattcagtcaggagagtgaaaactccgttaacctcgatcgtcgacttgtcttctcccattgtttccttgaactgatagacctctccgggtgcgtcgcgaagacggtggtcatatgtgacatcgtggaagaatttctgagcatccagcgcacggccgagcaagagagcgaggttgcgatcattggttctgataatagaagctatcaagtccaccgaatcagtacccgaaaacgcattttgatacgaaaggccgttcttctgtcgttcgccgagtgaaatcttctccctgaaaatctcagcaacaagagaaagcagagcaggatataccaccggaacctttcgctgcgaatccctagaaactagggtaaccttgccgccggagccctgtgtggcttggctttgaacgctcattgtccgatcgggcgcaacagtggatgccatagacatagtccgagatctctgcgatccatcgcttggctgacgagatgcaacaaattcatcgggactgggctgcatcgagtcatgccttattggaatctgctgatcgtgacttgacggaggtctgcggtgtggaattgaccttccgctgttcatgatatgcggatcccgatcagatgaccaggaagtcatagacatagctcgttcgttcccatgcttttctgggacaggacggccgagctgcgtgacctgagctccagcatgatactgttcacgacgagaagcagtggcagacgtgtgattgaagttgcttggcggaatctggtaaggcggcccgcttagttttgccattgaccttgaccgggatgaatcggaattcagcgcgggaggaggcatagcacgattgaaatccctagagtctaggtattgcggagcagggctcggtcttgactcgaggcgttgaggtcgaggataggcagcaaagcgttgttgggtgctagggttgtgtcgaggaggctgatgtgaagacattgttgccgaggcccctggactgtaggcctgatacagcccggacggctggggtggaggatatccatttggtggtgccgacggcggtccgtgtccatttggcatttgccgtgttggcggcggcggcggtctctgaaattggggttgtgcgacatgcgatgacatggtgtgagcgcgaccctgggcgaattgcggagtctgtgaattcattgtatgggaccgtcctgcaggcggtgcgcctccaaatatgtcagaatacgctgcatcccgctgcgtagacgaggcgggtccgtgaggccggtaattccggctacgctggccccccaaatccgccattttcgcgaaatatcagcgatcaaggatgagtggcggttgtttaatcagatacgcaaggtatatctatgccggggtgcgaagaaggcgaaaggggtatccgggttgatcgtggagagcgttcagggcgtcgcaataggtctgttcaagatcgtagaccacgggagaaacgatagaggtggaacgggagagaaaatttccgtaggcaataacctcgaaagaaataatagattgtctcaaagcactgatgggactcaatattccataactcccctcagttcggatggggaattcaaaggcgatatcaaagcggtactaatggaaaagcgccaggagccgtgagcgcaactaagtcagggctcctttcgatttcatgccctcagcatcctccgagatttgaggtcaggagtgagagtagaggagttgttgaaggtgggggtgataattggatgttgaaaatgcagtaataaactgggggagggggggggagggacccaggagaacgaggatggcgaaggtgacggcgaggccggtatggtaatttcagtacacagactcctaatctgccgttcatagggcttttaggagtgacatctgaaatacagtgggtatggtatcgtcaccgcccatgaccagacaatggcgtggactacggcgggcgaagtggccatgtggaacacccaaaaccccgacacctccagccgtcaacagcccgaacttctccctgcgcttgatcttgtatcaaacaggacccattttcttcttatatttcccccgtgtaatttgcaagattagtcttgccccaccatcactatggcagacagcgagcttgcgcccaagtttgctccgttcttctccttcgtgagttcaaggttccgcgaccactggggttcatagactaacaggcttcctatactaggcaggcattgccgctgcagtgggttcattccaacctggttccgactagacaatacactaacagttccctatagatgatcttcggttgtacgtgaaatacctctcatggatggagctagctctccaaggatataacgatgaaggcattggcagtcgctggggcggttaagaacctccttaaggacgtcagggaagtccttacacttataatggatagcatatcatcgctagagaaatcgtggtaccgtgagaggccacagtgggctatgaaccggttacaatggttcttatcggtgcagtggttcccatggggcctgttgcaacacttgagggccctcttacggtactgcgatatctctggcgatgacaatgacatcatttataagcgtaaggacttccttgacgtccttaagggggttcttaaacgcgccggcgactgccgatgccttcagttatatctatgttctaggtatttggacaaacagcttacaatctcacagcggcaggagcagcttatggcacagcgaagtctggcattggaattgcaggtgtgggaacctacagggccgatctcatcatgaaggtaagaaccgtttctctaggttccgtgatggacaggacggtagctaactgagttcatgactgcagtccctcattcccgttgttatgtccggtatcattgcagtttacggtctcgttatcgccgtccttatcgctggagcaatgggaccaggaagcaatgagagcttgtacacgtacgtttcgaaagttgggtggatgtggagcttggcacaagctaatgatgcacagaggcttcatgcatcttgccgctggaatgtcagttggtcttacgggtgtggcggctggttatacaattggagttgtgggcgatgcagtaaggaccctatatgcgcggcaacgtgagaggactattaagtcctaacaactactctagggtgttcgggcatacatgcagcagtctcgggtctacgtgggaatgattctcatactgattttcggcgaagttcttgggctttatgggtatgtttctgagtcggggttctttcagattacctttactaacatggtcagcttgattgttggtttgattctaaactcgaagtcttgagcgctgggcaattccatacgccgactcattcaacaacactttttcgtctgctaccggtcatcctgggctcgaacagacaccatttttgatatatgtgtaccaacaacgtaaccaggacagataatggccatggaaactggatcgagatatggaccgactggtttctgaatcgaatacattcttatttccggtgtacaataaaaggatcttacataggttcgggtcaaatcaaagctaagagcttactcagtccggtttatcaccgtagtttctttcccgtccagccccgcctcccatagcaaatacgtcagagaactttcattcttacaactctttgccccgcgatttttccgaaaccctagattctttcaaaccttcgaacctcgatgttctttatgatctgaaatccggaatcgagctgtgttgccgattggtggcgcgctaacggggtctccatacacgtttttttcccttttaccacgacatgatctttgaccattctaatggcaaccggagcagtgcaacattcgcctaatgaggcgccaggaaccatggtatttcccaaggtaaatggaaacctgcatcacagggacaagcaactcgtcgagtctttccgtcctcctccgcgatcctcgaacccatttctcatcaccgagcgccaggacgagaagcaactgtgcatctcgtcaaggagtctgcgcgtgagcgattttgtgctcgtcaagactcttggaactggttagcgcgtggccgaacccatatttctcttacaggagtcgcatctgacggttcatgcttttctcattgtataggcactttcgctcgggtgtggctcgcaaggttaaaagaccaaaaggacaagagcaaagtatatgcgttgaaaattcttcgaaaggcggacggtaagcgccactttgtctaacgttgtgcgtggcgagggacaacttgtgctgattgcgactggaaagtgatcaaactcaagcaagtggaacatgtgcgcaacgagcggaaggccctcgcagcggtcattgaccaccctttcatcaccaccttgattgcatcattctcggatgagaaatgcctctatatgctggtatggcaacttgtttttttggaatacgaaatatgtcttgattgatcacaggatgctgacgaattgtcagctggactattgtcctggaggtgaaatattcacatatctacgacgacaacgacgctttagcgaagaagtctcgactatctatgccgccgaaataacaatgacaatcgagttcttgcacgatgtacatggaattgcctaccgagatctcaaaccggagaatatcctgttggatgccgatggtcacctcaagcttgttgacttcgggtttgcgaagcaagtcgataatcgcgagacatacacattatgtggcacaccggaatacctagctccggaggtcattcaaaacagcggccatggacttgcagtggactggtgggctcttgggatcttgatctacgaattcttggtcggacagcctcctttctgggaccagaaccctatgcgcatctacgagcagatcatcgaaggtcgtctacgcttcccaccgaatatgccacctgcagctcagaacatcatctccctactctgtaaaacaaacccgtcggagcgactgggccacatctctggtggctcgactcgagtcaagtcccatccgttctttcaaggcatcatctgggatgatttgttttatcgccgggtgaaaggacctatacttccccgcctatcccaccccgcggacacgggtaactttgaagaatatccggatccccccgacctcagaaacacgaacatttacacggaggatctgaagaagaagtatgaggtattattcagtgacttctgaaagacttgtttccaattacggcctatcaagctcgcaccccaaccttcatttttccggcattctcaaatgacggccatttctctataacccccacgggacccccacggcacgcgccccgaatgcttctccgctcagaggccgcactcacgaatgatcgcgatcattctcgccaatctcacctttcgctttcagatacgatcccatgacagttcttggtatgtatgtctgtggcgaatctctcggagagtatcacacccctcgccatgctattcaaccggtctcaccgccaccatttgaccttcccttcccacatatccacacccgtggacaacgatatgaagaccatcccgggtagtatctttttttttcttttttacttcttctttttttcatatacacttccctttcgcaaaaaccttgttttgatcgatcatggagattgattaactggaatctatcaaaactacagcaacctcgcaaggtctttaagcgcaatcatgtgaatgggagtgtgttaatgctatttttttactctcttttcttcgtaaagtgatcaacatgcatagtcatgggttgtagatcacgatggtacattggtggttgctttttatacttagggttttcagtatcgtccataagataatgcttggtgcatccgcatgtagttatttcatcctgaatatatagtctcgttccgcaaattccatgtcatattacaatcattcaatagatcatgcctcttgcaatttggccagtagatacaaacatataggaagggagagaaccctatatactagtttggggtgcctaggattgacgtacctagttatatgatcatcagcaattgtcgcagtgggagctataacgcaccttcttatcgtctttggaatattaatgtttatctccttgttcagataaatctgagtgtagtagaaatacatagatcctcctggtggcaccctgacgtggtgggccttcgagcatacagaaaaccacaatttatcaagcccacagatgatggacttcaacctttgatatattgtatagtatgtactaaactcaccccaacagattcttcctaggttgctttgcacaagcggccatccttactctcggtccactcgtcagacccgacagcggttctagcgtagaagatattgttcggatcatatttagccttgaccttgcgcaaggtatcatagttggtaccatagaagaccttcttgaagttaggctgttggaagtcaccctgccaaaatgataagcatgcgtacacaataatgaagggaatcatagctaaatatcagtttacatacctcattcatataagcaccggacttgggagaaagcgcagtcagcttcggaatgaaatcctcggtcatttggcgctggcgctccaacatgagagcagagttgtcccactcccatggggtcgtcaaagtagtatcaatcaaggcttcgcgccaagcagggaggaccgcgttgtggacgtctccagataccttgtgggagacgttcaagccgacgccgataaaagtgccgcccgcctcggtgatctcacggtaggcagtcaacagggcgtgattgttgttctgaacgaccgatctcggaaccagccagccgccatattgggccgtgccaacctcaatggtgccttgcatgtccttgaactggctgtagtagctgtcgtattgcttggaaaccatggtgtactcgatgccgagcttgtcgaggctgttggtgaaaggcttgagcagcgtcaccaagtcagcgacagggatgttgggaccggtgatcggagcaatagagaagctggtgttggtgaagtaccagacgctcatagcacctgcgtcgacgatagcgggcagggcggcgtggaaggtctcgatggtattgaagaaagtgtcttgcgagatcccatcattcgtgtaggtcaggttcaggccagagacgggggttcccgggtgtgccttggaggtcatggaccagacgataccgtaagtgccagcaccaccgccgctgagagcccagaagatgtcagagtgctcattgtcgcgggtagccgtgatgcagttgccttggccgtcaatgacctcccatttcaggacttgatcggcggccaggccatagcgggagcccagtgcggagtgaccgcctccttgggtgtagccaccggcaagaccaacggtgggacattcgccgccgacgacctggtaaccagtttcctcggcgatctcgtaggcttcgtggccttggattccagcgcccatggtaatggcctttccggtgtagtgcttgtcatggtaggagtcgattgacagatccttcaggtggtgagtccagattgcaagcgctccagcgccagtggatcggccattgtagtcgtggccggtgttacggatgacaagacggatgttgtgcttcgttgcgaatttcacagcgttggaaatgtgagccgggctggtgacattcacgctgtagcgcacatagttacccagggtgcagggctttgagacggggtggaacggatcgcaagcaccctcggcaaagaacggcgccataaccgaggaagatgattcatagctgtcagaaacatatgtcagtactggccctttcgtgttattctatatgcagagtcacatactgctcctcaggaagtagccacccatccttcaagactgcacaggtctcggaattgtagttcggcgcatggcaaggtgtgccgagagggacggtcttgactagtcgaccatcgacggttttgttcaattgggaccattgatcctcggtgggccagcaagcatcaccgggaaagcaacggcatgccgaggctgaagcctgaggcagaactgccaacagcgaagcaatgagggatgcgcggaaaaacataacggattgacttcatgcaagtgtaccaggttgcgttcaaacgttccggtcttatgcgcggaaaagctaacaaccagagacggttcgcttagaacatagaaaatgccgcggtatcgcaatatatcttgaagctaataatccaccacgccatccctgccagccttgggaagcaatatcggaatgcagatcggaggggccaaaaccagccacccatggaaaagcctgccgtttcccccaccacccagtcttggaatcttggaagccaggagcactagtactccgtactacatataagctggcttggtacgtatgcaaactttaacataagccaccccaagcgggttcttagggttggaacatatggtccgagtaattgcatacaattcaggggcagatctcacctttattttagctagacctggctttctgctccctccttgaacaccactcgatgtgttctagattatagatattttttctagatggcacaggtctagaatgtataatgcaaaatcgtgttataatggcttgctcatagctaactaagccaagaccgaaaaaaaaacagaaaattcttcttattggcaaattctaattcatatcctctcgtttccacgctcgtgaagctagcgctgcatcttaattgcgccgatataagccccccgccgccccgccgccccacccgaatcaagaaatcttgtacgttgtactgcgaaatacccgtggactccgtcacaattatgaataatatgatatctcctttgcagaggctatcagctctccttgccgtgacaatgatcaagtcatgggctgggtatacaacctccacgagaccgatccaaacagcgagattccgcgcgtgatcgggatctgcttggcgtgttcaattacagctttcctagccgtatgtctgcggttttatgtgcgaatacgcatcagtcgctttccatggattgacgactatgcggcactggcgggctcactgttgacgttggcatacgcaggtatcgccgtggctcgtgagtcgattctcattgatcagcgaaggttaactgccgaactgacgaaatggttatttcagagacgcgatggggccaaggactcagcgcggcgtattttccaaaagagaatgttattccatttagcagggtacgcatcgcaaggtcaacattgttcgaactcgagcccgacgctaactttgtttggtctatagatccaatacgctggcggcccgacctattgtctcgctgtcctcggcttcaaagtcgccttgttggcctcctatctgcgcatcgcggggattatcgagcgatatcgtaaaatcataattgccactattgtcgtgtgtgtcgttaaccaattgattttcgcctttatcatatcaatctcctgcataccggttagcagctccccaacattacgcgccactcacaggaaacgggttatctgacaacaaacaggtcgcaaaacaatgggatacttctctcaaggggcattgcatccaaacaataccgttctactttgccctcgggggcacaagtattgtgctggacctgataatcatagcactacctctgccagtcctttggaaactccagctccacctcaagcaaaaagtcctcctagcctgcctgtttgctctcggcttctttgtgaccgtgatccagatcatccgcatcctcaccgtctgggacttgaagacctacaccgacagcaagaatatcgtgatctggtcttgtgtcgagaacagtctgggcgtgagttgatttgtgatatttctgcaagtccaaggaaagactaacaaaacgaaaacgtgtaggttatcatcgcctgcattcccacgtacggacctctgttcaagtcattcgcttccactgttaattcataccgaaatcgcgaaacttcaaggacttatgcgcttggctctgttcgccaggacacggggacggggacggggacggggcctgggcatggaaatagcaatttcgaacctatatatgagtccgagggccagcagatcactgagattcgatccggcgcgcaaacgaatgatggggatagcgaggagcatatattatcagaggcggagaacttaaaagtatatgtaacttcggagtttactgttaagtctggcgcagtttgattttggttggtaatagggaacttggaaagcatgcttttgaatgggaaatagaagtacatatgcccgataccaaatacgtgttatctagtactcggattagacatgcactgttgcaaattagtcgtgtgtaacaagccccattcataggcaatgggaaattctcgaaaagttgccttttggctatcacaacaatgagattggaatctataagcagctagtatagctagtagtagcaaaccatttaccgagaaaaaaaaaaaaagcaaaataacagtgtacataacaatgaaaaacaaagttggggaatcatatgaacagatatcatgaaacatggaacgggtttagagcttgcgcctgggttcggtcatatccaaggcaccgatgatgacagttcgatgccgatttgagagttttgtgactggagtagaaacaaccggaaaatctagaagggaggcgtggatgattaaatcggagcaaatattgagatgaactgcgagcaagggcctgcgataggtctccgatactatacagtgtacaatgttggaatggaatagaataagctttgggcatttttcatagcgatgggtctgtcttccatgtgcctaaaaaatgttagtactatgtccatgtgaaactacacgaacgtgtcaaaaataaagacgtacctccgaaattgtgcttcacaaaagccatgggatcatctgtatcccccgcacccatttgccccactccagggctgaagctggtaatggggagaacaaccacatccccaaccttgcggtgcgtggtttgatggctgaagtcttcgtaggtgatgttcttatcaccaggctggatattgaagtatgccgggttgttgaagtagcggaaaatagaatccgtccaggctccaggccctgtgaactccataatggtcttatccatcttaccaacctttaggatgcctgcctttttcattcgcagagcatgctcggtaatataagccaccatatcacgaagaatcggatgcccgggtttagacacaaaggtccactggcagaactgaagacggcgcgaataccagtcgtgccagtcatcacggtcaggatcagcttcgatgccaacaatgaagccgatagttgatcgatcgagttcctcggggagccacgtgtgcgcgggcttgagcgccgaagtgtcaatatcgctgtatattcccccgcgcgctagaaggaccaagtatcggaagaaatccgccttcataacaccgagcggcagcgaatcatatgcctcaaatacctccgggactgatccatatagatatttgatcagatgttgttgtgtgtcatcaggaatgacttcatgcgtgaacccggggtgcatctctgtccagctggcctcggggccgcgaaggtcttcgtcaaaccagaacgatcccgggctgtatttccatgtttgccagatgtatgcggggaatctgttttcgatttcataggggaattgataccggagacgttcgcgaaggggtgttgtccgtgatgcgccgaggggtaattgggcgcgaccttgcggtggtatttttcgtgctaagtttgctatcgcctcatcctcttcctgcgatatcttcttcaccggtctatacccaggtgccccgggaacttcaggatctcggaacgagcggaggatgagaacaaatgtgaccacgcagaacagggcaagcagcaccttgcgcggggtaatcatgacaggcgatggagccggcgcagtcgggaaataattccctggtcttgcgacagccgtaaataggctgaaagataggaatcaagtcaaggcctctgtgcttttatcttctgtgatccgcgggattggtgaatttgattcttgttatgcgtttccttcggcgggtgtgacagtcgagcgattccaaatcctaggctaaagaaattgagagggtgacatgtcgatatgcggaagtcttggatgtgacctcgatggtcggagatacggtcaacccaaaatcgggataggaggcgtgaaaaaccaataataattgagggtgactagtaccgcagaacagcaaggataaattgaatcgaagagcaggccacgctgtctagcagcgggtaatttctcgccttgttggctaattttattagacgtccacgagtagaataaggattgcgtatgccggaagcagcttctagcctgggtggagccactcacgtggtcttagaaatgtaacttcaaaccgccgtctttgatattgtttgttcttcatttattctttgttctgtcttttgcaaaaaaaaattttgcatatctctatgctattaacaagcaatgatcctactgcataatcacttggttttgttagagcgcccccacataaggtgctcgattcagaatagtcttgatctttagtttcttaactaaactgcgtaaaactacaatgctaaaattgtctagcctcgtatccaatatatataagtagtttagcatagattcactataaactccgatagtgatataagcttcgcttggtttagaaatctaatatggaaccctgtacaatatatcgcagagcaaagagcatccttttaccgaaaacatcagatctgccaaactttagggatttttgggctctttacttttaggtgattaacaagtattcaataaccatgtaggaagggccatgtactactattacgagaatacttgttcttttgataggactacgtaggcataggcttttgtcatattttgtctccacttttcgcattgcggactaggagacgtaagaggaaaacgggtcaaaggcaccaaaatagtaccctagagaaatgcaactataaagaatattgttagagatgccggtgagaggcttgccggccgataccttctcgttatgctctagatctttatccctattagcaatggagtatctctactccgtagtgaacaataatcttggctccgttaaaaatcctattttatatcatacaatataggatcatcggaaaatttaattagccaagggggagattctctctttgtccgtgatgatcttcgtggtagaaatagcctctaatactattaagaggatttactccgcttgatccctagaagcttaggtctcgcgtcaaagcatttattctcaaccttaaggaatggatttttgttgcaagataatatggtttttatgataaataagactaatacgcgaacgcgaacgtgaacgcaaagtgaaagcaaaatgaaagtaagacaagatcaatccaaaaggaacatcatccccgacgcatgatggcacatagattgaggaccacttctttcctattggactcattgctaaggtcgtaccagggagtggccaccacaggaatgaatgagtctagcgaatccaaaccaaaatccttaacatactcatcgctaatctcaaattggagaaagcgaaggtagtgctgcgtagcatgaatgactatgacggtctcacgctgcacgtcaacaaaccgagccaacagagcctcgcatgtcatctgggctagacacgcgtctgagatgatcggtttaccctcctcaaaacattggaattttctcttggcttccagaattgccacatgatcgttttggagtataaattccttggcattattctcatcgcgtgagcaaagacctccgtcatcaatggcagtaatcgagctaattcctcttaggactgtccgggttcgtaacttgatgtcccgaaactcaacaacactcgacatattgggctggtcttggggtgccccgaaatatagaatatgtcgaatgacgcatgatgcaaggcgcacggtctcatcttcgaccgtacctcggagttggtgttcctctttttcaatgtatccagccgatgacgcatcgctagagctcggagcccggggactgctagaagcaacttgaattgtcccagaggggacgcattcagaaggggacggttggttcagatgattcttcacgcgcccctctccccttagccctagtgatgcggccaccgtcgaattcagtagccattggaacatcagaatccgcgccatcagattcggtatcggaatgttcggaattgccgggggcaattgcatatcctgtcctcttagcgtcacgatcacccttgaatgctcccaatgctgaccacgtttgagcgagcgaaatgctatacccaaagtctcgcacaagactgtgctcgcttttctggaaatgcgtattgctatcagggcctccgaggaacttcgtgatatccaccgaagacgtagtatcggaatatttaaagtgttgggacaaaattggaagaatattgggcctttgtggtcgtattataacacgacaggcaagtagatggtcccgtccccatccactcgcggcagacattttgagttcggaagggtacttctgatttcttcccttgaactgaatgacagaggtgaaagtgtcgaaataatggggagacatgttgaagaacaaaattgaaaaggagagaggatctgtgatgataagaatgaacttgggcaggcagtgcctttttataccacctcttctgcaaatgtttgcctttccaccacatgaccatgaaacagagtgttggtgatgaatgcctgtataaccgccaggcccctcattttgaaactgctggcttggagtacaactgcagaggtccaatcggtttgttgggttagtattaataggcacgtggctggccaaccatatacatgtattatccctaccatatgtattattctaggccaaaggctcgtgaaaatcctttattagaaacatgagctagcttagttggcccctgacagctcccgtggtctgagagtggatcgtgctttccctaagcgccgagccccgtcatgccggacagtgacattcgatcacacttatcctcgccaatggccaggaacatccagctagtcatacatttagcgctgttaggtcataatacgcttctaggacccaatttcagcccaatttaatgtaaggggatcattgctaattctgaaatatggatgtgaagcaaaaatccaccaatagttcaactgatttgcactttggatgatcgactggaaacatcaaattagctgtacctccccttagatctggattttgctagttcagggacttgactaggctggaggtcagtataggacgggtgaactttcttccggatcaacactcaaaggcggtcaagacccgttttagactcccttgtattcccagttccttaacctcatctttacaagtatcttcagtatgacagctggcgcaatttcgcttgctgagctcatgagccatcatcgtgatctcttggttcaaccaatatgctggacttctcgtcatttggatatgctgggatgtcaatttgaacactttgaccatgtgccaccagacgacatcgaacctgatttagatccatgccaaccaattgatcacgaacagaagttggaagaacggagtcgcggaactcccgaggaactctttgaaggctcctctatactaagccggccgttcggcctctcatttctcatatggcccttgcttaaccgaagatggtgagcaataaaagccgttcgtgtcattgattcattccgccataactaaacattgttcacagtgaaacaccgtattttttttttgcaaataagagaattcatcggcctctgtatgaagtgttctatcgctgccgtaaactcagccagccagctagccaagcaccgcggccaatcgttggatatttggattattgccgcgtagaacgttaccgcggggaaatgtttatccctcgtacgcccaaacatggcggtgacaaccgccccgggtggagaattcagatgaaacgagtagcccagatcacaccaaagaactggagcgaggatccgtatctgctgtgtgttctgttgtcccttgcacagctccaggagtaccatcgaaaagagtggcacccgcccatccacatagtaagtactctgctactcctgccgtttttcttccttggatgcctggctcatttatacaagtcgcgtctgattttgacaaccaagccgggcgataaattcttccatatttttgaagctcacataacttctgagcttctcggaatgcttgacaacccaaatactgccagaaagcacatagactggccgaccatcaaacacaaaaaggtcctattcagacctcttgatagtctcgcagagcgacttcaagctgagatcacccttaaccagccacctggcacattcgatatctcagatccagctaatccaaatgacatcaaaaaagaagaagaggatgtaatccacatccaaagaacaaaagaggtcgaaaggaagaccagaaagagagcaaaaaaagaatcattcgtccgttccgagacaagagtttcatgaaaatgcttaaacaaggattacgacaattacgccctggttggtctgcgaggtcggctattagaccacactacaccacaaacgactccaaattcccatcatcaaatgatgccatgtctgttattctacattccctttctgcgacctgaaatttactcccatgacaagccttacacatcacggaaacggaatgtctgaccgtactcggacgcctggaggccagatgctgggtaaaggataaagggcacaaaatggatttggtttctctctatttcccaatcggttcgctcaacctacgaaatgaattacgatagtataaactcatagtggaaagattatgtccttggatatgtcgaagcgatacacaaacagcatggtccttgataccaagccagccaagtgctgtgttcaaataccaaagaaaatgcatcacaagcaacatgaatactgttgaagcattgagtttactaaaggctatcaattggtcttatattctttcctaacacttaaaatcatgcgtaaaaagtcaaattcccaaccataacagcatagaatttccgagtgagcatacggtgatcacttcatggcaactacacctctggctgtcaaccatcaactatatatcttgtccgatattcatatctcattcttctgatcagaaaaatccgtttttcccacgtaaactaaataacttgtgatctagacaaagccgtttggatagcgaatcaaggccgtcagctgttgtggaacatgatccacactgccatgtgggactaatcagccgcaaaagcttgatagataagcgtagcagacctcgggaaagaataaacctgatctagcagctttataaacatcaagactagtatgttatatagaaatccgctttggaagtctcgttaggtagacgcaacggattgtgagttagcaacatagacgctatccagttcaactagcaatgctctttttttgattcaagctttattattcatctcaattgttctataattcgatgatagaaacccagctttccaaaaccaccgtatgcccagtacagataagccatcacctggtccctctcgctgccgaggccagccgagagcaggtgatttgattcttcatgctcgactgatcttaccatttcaagatactctcctcgctggcgccacctttctcgtagtctctcatctaacggctgtccatcttggtcgtatttcctaggtaagtcaaaagaggcaggtatggtagcgaggaagctggggaacgaaataagtttgcagagagccgtaaatgcgccttcccagtcgatgattcccgttatatcgaagctgttttcatctaccatggtctataatcttactatatagaaagtcatcatggactagagggaatggccctttgttgcacatagatagccggctagctatcgctttgatctgcaataggaagttctcgataatcgtaatcatctatttcgctgagatcggccctctctgtatcatatatatgatcgtttctttatcccacttaaacttaacgctatcggcccacgtctcgaaaaatgcggttgctgtgttatcgaatgtaccgccaattccgggtaagggtctacactcgtatccaccctctcggttccgaaaaatcatcccaattttcgggagtcgtaaagaagttaactagacctatattgagaggtaagctaggcaccagccggccctataggtcgactaacatgacagtttgcgacggtgcgatagaaggcttatcggtgctctgtatcacaattgaagtcgtaaacgtgtggcgatgcagccagagagcagccccataactataaaggcagatcccacaggattattctcgtcaatctcatacgcaaaaactcgaggcattggtaactgggaatgctccttgatgagttttattgctacaacttcggattcgagttgggagctgctaacgacgtaagaggtattccttcgaatctgaacccgggctacccagtgagtctcgtcgcaaaatttagtacacggacaatattattgagcctgcttgcaagttgcgacctggtctaaaaccacgcattccaaatggccagcaaacccaaagtaattcggcagagctcatcccattgagtccgatagaaacaatcggagatttgactattacatctttccaggaaatcatgctcggtagtccaaggggttgagctgggagacataatcacggactatcgagttcatgtgggatatcctcgtaggcttctataggaggagaataaaatagagagaactgtataaaataaaactagcagcatacatacttggtacgtgcacgccgtattgttccatcaaatgaaaggcagaggaaatcgagaggacaatcgatccaaaaggaggtatgacaaaccagatctacagagggtacttcattcaaaagaacagatataggcaagagaggagcaagaagtggtagtcctcagtaaatatacatctacaaattatttaaagtagcaaattgtcaaacaaactgtcgagcaatttctacaacatagcatctctggcacgtgatagccctaggtcatgacttgtggggaaagaccaagggtctagcccgccccactttgacgccccacttactcaaacgggccaacataagataagcaataaggcttgaaactgttttgagattgaacaacgacctcgggatataagagatagtaccccccacatattataggcctcctacatggagataccgcactgggctgctagagaggataacctgtcttagcaaatgaagtgctcgatctgttaaatcatgaagtgcggaactgctggttttatgtaggggctacattgttactcctgcggatgagggcagaggttgaacaagacaggactggcggataagcagaaattatgggcctttatctaggttcttacgataaaaataatcctcagcatcaaagaggagccgggacttacctgtcatgcttgaaggagatgatcctcgacgctttcatgcggctgaagaattcttaacttaatatgagatacgatttgtgaatgaatcgatggtggaatgttaccttcgggcgactcatctgagatgcattgcttaaggccacactaactacaccttatgtgtttttattgggtcggcaaaaatatcatagaaatgtgtgtggagcgagggctcagagggaaaagtacagcattgtccctgtggcgactgcgatgtacaaagactagcaacttttgcgcgattttcctttatagcgcctattctaaaagagccaatcatcttctgattactcctcgtctgaattacagccaatcagtctgccgcttccaaagttgtgtctcggcttattcttcccgttttcacatcatttgggccatttatcacctcttccaaggttgaatggcatgctggataagataagccctgtagactcccgaggtccagaagtccataaatatctttctctcgcttgtctcttaacctccatacccaatttcaaaccaattgcagtggaagtcattcactatggaatagcccgactttcttgaccttcctgctcttacccagagcctcaaccactaagcaatcttgattcaagccaacggtgtctttctgcacaagaaatcccagcgccagcttgccttgatttcactggaatcacggaaaagaaacaatggcgactgctgtacctgaaaaatacgtggttcccgctgtcgtccagtccatcgtagttagtgaaatcccaggcagcagcattaaatcttccttggattcgacagtgggagccagagcagaaaagggagaaaaaaaaaacttttttactcgaccatggggacgacgtcagattgggatactctgcgttctggggttcttcggattggccttaacagcactcgtcattgtcctccccatttatttcactaagatctacggctttgcgaaagacactgataactactggagactaccccagccaaatgaagaccacagctactacctcgaggagaatcgacctgtcttcgccctggtcaatttcccggacccgggcctcattcaacacaatggcacatggtatgcctacgggaccaatcccaagaaaaagaacccccacactatccatgtacccgttgccacatcgaccgattttattaactggactcttcacgaggattacgacgcgatgccgactcttggcacttgggagaagaaggtcaatcattgggctccggatgtgattcagcgcgtaagtataccaatgagcattagctcctatccagtatctgatattcatatatgaacttttaggacgacggcaaatttgtcatgtattactcaggagaagccgagaattacgggagccaccattgcgtgggagttgctatatcaaccggcacgagcccactaggcccttacatccccgaagacaagccactagcctgtccacacaagcatggcggtgctatcgacccttcatcgttcagggacaccgacggcacgctgtacgtggtctacaagggcgacggaaacagcgttggacgcggcggcaactgcaacaacagcaagaagccagttgtatccgttccgattctcctacaggagctgaagagcgatggtatcacatccgtcggggagccagtgaaaattctcgatattgacgatacagatggtcccctggttgaggctcctgatatcttgctcaccgaggacggcacctactatctgttcttttcttcgcattgctatgtctcgctgggctacaatgtgaaatacgcacactcgaaaaccctcaagggtccgtacatccgggctgatcggcctttgctgcagactggtgattgggggctcgaggcgcctggtggtgcgacggtttcgactgatgggagcaagattgttttccatgccaattgcggtagattccggtgtatgtggtctgctgctattgatattcgatctaataacaacacgattgttatgtcgaaactcgtgcttggccaggcgtcgaattctacgaaaactacgggaacactcgtgagccggactaggaatagcggattgcgatacctttgagcaagcaggatttactatgatatattcttcacgacttttatgttttgaatttttttgcatctcgcgctgggcgttttggatttcctcatttttgctaaccgtttgtatgagaatcctctagggacctcagctatagctactttttcaggatctatcaaaagccgaactttgcatgcttccaccctccattccttgtttattagcccttcgaacactggatttacttgatttcttcggtagcctctagcaccataaactagccattctccatagaaggtagaaggcgaggatacaaattaacctgctcttttggtactccgaggctaatcaattccacatatataagacagccttgtcagacaaagttgcaaataatatctatcgtatgttgtacattgacattgcatacttcaacgctgaactctccaccaatcaccgatgtcggtgatgacgcgactgcttagtgcctgaggtgtctacatattctcccaccggtagctttcaacctaggaagctttctttccttcctgactctcacagatcctacgctcttataatgcagtcgtttcgaggcgccgcccgagctgcttcacgcacaattcgaacccagccatggcgacaagccaactcccctgtgaacaccgcggggtcgcatcggactttatcggcgccatggaagaccgcacacccattgcatactgtgtcgccgcgaaagtcagcatcagccaccgcagagtcaagtgagagagactcctccaatccagccatgtcattcccctgcctcgatgcccaagaagcgaagtcagcgcaactctccgctcggtcgctgcaatccggccccgaaccttcatacaccactgggcggcacgaatcataccactgtgaacagccgcttctgctcgactggggcggtgtgctcacagaatttgatattgcctacgaaacctgggggcaattgaacggcgacaagagcaatgccatcctcttgcatactggcttgtccgcctcaagccacgcccacagcacagcgtccaaccccaagcccggttggtgggagaaattcattggccctggattgcccctagacacgaataaatatcacattatttgcaccaatgttctcgggggatgttacggaagcacaggcccatcttccctcgatccgtccgacggaaagcggtacgcaacccgcttcccgatcctgactttggacgacatggtccgcgctcaattccgacttcttgacggcctaggaatcaagaaactcgctgcctccgtcggatccagcatgggcggcatgcagagtctcgcagcaggcgtcctcttcccagagcgggtcaccaaaattgtcagcatcagcggttgcgcccgcagtcacccttacagtatagcaatgcgacacacgcagcgacaggtgctgatgatggacccgaactgggcgcgtggattttactacgacggcatcccgcctcactctggtatgaagctagcgcgcgagattgcaaccgtgacataccgcagtgggccagaatgggagctgcgctttggtcgccagcgtgcagaccccagtaagcagcccgctctgtgtcccgacttccttattgagacgtacctcgaccatgccggtgagaagttctgcctcgagtatgatcccaacagtcttctttatgtctccaaggccatggacttgttcgatctcggccatgctcatcagagcgcgactctgaaacgccgcgcagcgtccgaagagcgcattgcgcacggcggcgacgtcccaattggctcagactccgcttgcagtctgactctcccagacaagccctatgaggagcagcccggatcaacctccaatacgaccccactggacaagtccgtctcagctgactcggtggatggtcctccccgggatcttgttgtcggccttgcgcctctcaaggaccaccctgtgcttgtcatgggtgttgcaagtgacattctcttcccggcttggcagcagcgggagattgccgagacactccgtgctggaggcaacaagaatgtcgagcatattgagcttggtgatgacctgtcgttgttcggtcatgacactttcttgttagatctcaagaacatcggtggcgcattgggcaagtttttgcgctagtcgcatggcgatctgcgtccgaggcgataaagaataattaaaaaatttgtaaatacgtcgttcagcgtgcgacatttggcatttagtaggcgttgtacatttacgaaatggaaatgagatgcctcttctctgtttttgtttgcagtcgggaatcgatggatacctccagacagtctacaagtggatggtacgaaaaatgaacagatatgccgatgtattatttcatttgattctaccaagaggttatatgtacattgaactccataaaataaaaggaaactcgccctcaggttgctctcagttttcataaccggcttccagctgtatacacggtccacaggcacgaagtgccatgaatggagccgtcgtcaagcagatgcatcagaattggcttatgttcgtctgagacgaactcatcacagggcgagaaggggaaaagctcataataacacgacccacaaagcccacaattctaaaatatcaccacacccacaaaaaagcagaaaggaacaaatataaaatcaagactgagaacatgaaagtcaggataaatgatgaaaagtaccaaatttcagttgacgtactaggagaacccagaacgtttatagaaagactacagtcacattgcccacaaggccaaaaatccaaaaatccacgagacagacaccaaaagtaaagcttggaagctaagttctttggtgaaagttttttatagaatcacaagacaaaccaggaaacccagaatgtcattgatagtcgaatgattattgttcgccaatgccgcattggagaaacgtcaccttaatggatattccctcgaattcagcagcttaaaggtgcgaaagagaggaagtggagaagggcaggtatttatactgcaggcacagagtgcacaaagggaagggtcgcgtatccgtttgtaggcagagctgttgtccttgaggatacgcctcagcgtgtcatataatgagtggctctcttcaacagggagacgaagcaacctccgatatctatcatttaatcacaatagctgtcgaccgtttttctccacaagaagatggcctatctttgagacttgttagaggctatgcggttaactctttagattagcaggtgtcataggcgtgtgatggtagccccatgaagtcgctgttggctgttgcctccgcgaactctgcattggagatcctaaggtgcaggatatagtcatagacttgtacaaaaatgactggagataaggaattcaggcttggccaatgccttaatgggaatataaaattgacaagaagcactgatgttgttttaagtccaagggattaaacgttcttccgtcccggtactaccagtatactgctttctgcctgaggcaaaagccatttcgatgcctggggctattctactgcatggtctctatgacgttcagttaggaatactataacataggaactgtttcaaaattgtgtttctaagaggtcatttggtgctgcatttcccgggtacttgtgccaacgaagggatgaaactatttgtatttgatctatcgcatcacgcccaagagtcattagaattcagaaactggaccaaataaaacaggcactatgaattcagagaagaagctcaagataagatttctaaccacacattggtaataaacatgccctcagattgaaaactaccatgttttgtcactcgtcaccggcgtgcttgtcgtttccttgaaaggcgtacagacgaagcacatatacagggcctcggagtatgtaactgtattttctcatcactgggatattataggagggaggacatgaaaacacctcacgatgaatatagtactcgggagggaacaggtgattggcaaacaaaaccgaaggagatgtgagatttggagatatagaatatgtacaacacccctaaacgatgttagttgaacacattcaacaaaattccttcaagataacacataacaagaaatatcaaaggtccgagtctcgtcagatctctgttcattgttcaatcacacacttgtgggccgatgtcttcttccaccccgaggtatcagggggatgaagtccatggcccgacgggttcagtcaaccgacatgtcatgaaagctcttgtgaggtttatcgtcatcaagacttggcacgagatattccattgaatctgcattgaagctagagaccagagaaccagtgtgagaaaaacataccttttgtaatggatagcgaataattaggccgatgaacgcgtcgttattgcatcttctcaagcgataagacatagttgccggcattgaccgacaaatttttatcggattaaacatcaagctgtgcctagacgcgactttctcagtcaggctctataatgtgatgtcgagactgatggctacatcggtctgccaacaacgaccttctattgagtgagatgatgcaagagcatatatagcaatttcataagataattggccggcaaaagaaattgtaaagatttcggagatcgcatgagtgttgttagaaatatggtaagcacggttatgagcacgttgaccgcctaccataccgccttacttagtccctgcacaattacctagcaccgcagcacgtgatagccggcgtagtttcacgaatttggcttgcatatattccgttactagaagtccatatctgcggtcggctacttgtcatggtcagtacatcccacatccataatggctcccccagtatcaaaatggtggcaagagcccaacgaggtcgacctcgactacggattcgattctgacgaaccggataccagatataacgaacctgatcgaaacacctcccacgagaatagaagcaaatcgagagatatccagaatacatacgataagggtgtgattgcaagcatgtcttcttggctccaccgtcaggctggtaccccccacggacagcttgcgacagcggccgtcgtatccggcgcagctgtcgcaagtgccatccttgggtaccagtcatacaagcgcaaggaagctgttcacgatctgaaggcttcgatcccaagtatagatgatttgcatgctgcagaaatggtgagatgcatcggtgaacctgcgcattgagtgccaagcaagctacagggcaaaagctgattcggcggactatagctcaccgattttggcgctgcctcgaatggaatacagctgagcaaggaagatcagcgcagtgcagctttagctcgcagagcgcaacagggggactacgatgatggtatgtggcttttctatggcatgcttctgcgaacctatctcactcggctcgtcttgctttgatagacttgattctagaacagctcgcccgcaaccgtgtgttccttggcgatgaaggccttgccaagctccgatcgtcattcattgtcgttgtcggctgtggtggtgttggttcgcatgccgctgcctccctggccagatcgggcgtgtcaaaaatccggctcattgatttcgatcaagtcacactatcatcgctgaaccgacacgccgtagcgacattggctgatgttggtacgcctaaggtccagtgcatccggaggcgattggaacaaatcgcgccgtgggtcatgttcgattgccggaatgagctctatggaaaggccgcatctgacgagcttcttggcccgtggtctctgacacacgacggggagggccgtagaccagattttgtgttggattgtatcgataacattacgtccaaggtagagttgctacactattgccacacgaactccttgcctgtgatttcgtcgatgggtgcagggtgcaagtcagacccgactcgcgtcgtggtcggtgacatctcgctcagcaccgatgatcctttgtcccgcgctacacgccgcagactaaagctccttggtgtttcgtcaggcgtcgcagccgtgttctcaacagagaaaccgggcccgggcaaggctaccctgcttcctctccccgaggatgagttcatcaagggtcaagttggtgagcttggagttcttcctgacttccgagcccgcattctcccagtgctagggaccatgcctgcagtctttggttacacggtagccaaccacgttatctgcactattgctggctacccgcttgactacaatatgggcgccaagggccgcgagaaactctacgataccattttaaatgcattgctaaacttgcatgaaagaatgatcaaacaaaccaccggtcaagataccgtgggactccgcgctcctctcagcaaggatgacattgcattcgttgtagaggaagtataccggggaaagagtgcgatcagtggcttgtcgaacagactggctctcgttccctggcaaactcccgcacatggatggaagatggatctgagccttgagaaagagggacaaaagaccgtcccgatgaacatcaatgaactggtctgtatgacgaaggaggaggctctccgacacgaaaacgaggtgcttaagggtggcaagaaggtggaagatgtatatgatgagactgttctccagcgtgtaaacctgcgcagacgggaagcggaggagtacgatcagtaccgaggatagtgtaaaatgtacaaataaaccaaaaggacaaatatcaagttccaaacagaaacaatataaaggagtcgaacgttacggcctaataaaagaaagcgggtctaggtatacgtcagagccgcgatggttaattctgcctcttcacattcacctactctcgctcaatttcatcaaatgcagcacatgaagcatacagtacactttcagataaagatataaagcctaattcaggcgcaggaggatggcgcctcttgactcccatctgcaggacttcgagaccaacagggcagataacgactaccacccgaccacaacccaccgtccctcctacccaaaacaatttacactttattctcgcccactgattgattccgccagaaacgaatggcaattaagagccgccgcagattcccagcgcgcctccagctcctccgcggatgacatcaaatccccgggatggtcccaaatggctctctcggtagtttccgcgccgcggttccgacatgtgctgatatatgtcgcgttgtttctatttgcatttatcggttggcgaatgctggtttctccacgactacaagagcaaaaatccctgttgcattcacttgatccgacatctgagacagagacaggtgggtggttcgggacaaactcaaaccctcagttcgacggcttgattcagatccgtaccttggacccaaacctggtgcctgggaacatagcgggagtggtctcagggaaatctagtcggaaacggctaatcattgtgggcgacgtgcatggctgtaaagatgagtgtaagacataccccccaagtgcgggaatccctgaaactgacaagcctacaacagtggtgcaacttcttgaaaaggtttctttcaaccaagcaggtggtgatcaccttatttttgtcggtgacatgatcaacaaaggaccaaacagtccaggagtcgtggacttagctcgacagcattcggcatctggtgtccgtggaaaccacgaggaccgggttttgcttcttcgccacgagatggtgaatactgaaacgctcgcaacccccgatgacgatgaagatgctcgtttctcatccaaagaacttggcgagcgtgcagtcgcgcggtctttgagcgacgagcaagctcagtggctggagaactgctcagttattctgaatgtcggccaagttccaggtatgggccaggtggttgttgttcatgcgggtctagtaccgggcatcgaacttgagaagcaagacccttctagcgtgatgactatgcggaccattgatctagatacgcatgtacccagtccgaaaaagaacggcatgaattgggctaaagtatgccttctctttctatttcatttcttcagtcttgtcgtcatactgacataccttcaatctagatgtttgataagcatcaatcaaaattatactcgagcctcgagtcttctactgaagatccccttgcaggcaccatgactgttgtctatggccacgatgcttctaggtctctttccatccgcacattcacaaagggtcttgactcgggttgtgtgaagggggggaagctcacggctttggttatagaggatggcggaaagcaaagtattgtacaggtgtcgtgtcgtggttatatcgaggaataacaattctacacgattgctttgggtccagcattataggcaaatgtattcttatgtggtggctaaatgacatgtgatggaacgctcaccattatgaactaggtatggcctgtaggaagtcaaattcagattgccggcttaaagtttgattagtcgaagccaattgtcggaaaaataagacaataaagaatagcaccagaaacctcggtggaatcgatggtacgaactgttcaatccagcaggtgcttgatcaaccataacacagagagtaatgtgttgatccacgcggatgtgaacagaacagaactgtagaatatagaacttagagcttactgtatgagggagggactaagcccctgagggaagataactagtattaccaaagattccgaggtcagagcctatacgtcgcaaatctaccaagaatatctgtctaatttcaagaagcatgagggtatgtacagggtggcactatggcgcagttctctatccggacttggattcggatccaggatcctcagggatctcagaatcagggaaaacaaaattaccatcagcgccccagacagcaggtggagaaaagtcttcataccaaagaccgcccaaagcattagtgtgaacgagtccaaaacggaaatactccacctcgtcgggataagtgcgagcccaagtaaaatctggaaaatgctggccatccttaggtcggaaaacctggaagcgctcgacatcgttgaccaaaacactcaggccgtcggcatggggctcgaggtccgggaacgaaaaaacgaggttgttcgcatccgtcgtggaaggaggatatatctttggtggaactgtaccaagtttagcaccatcaaggagtgcgcctggagtttggaggatggaatcgaagccccagcgggcgatgccgtttatgaaaagaccaataagaatacctgagtataggagactgggtcgcgtttgcagagttgttccaggtaggaagagaagagagagaatgtaatggtggatgcgtaggttcatgttcggaacggcgacaaggatgagaacaactgcaacaaggacgccgtagatgcttatcgtagggaagaagcggccttcgtgacggtaacagtgtgcttgaccaaaggcgattacgatcaaagacccaactacaatgatgagagctgtgagagcacccggttgctgctggatatcgtgaggtgtgaggcgagagattggaatgcgatcaaatgtatccgtgttcagggcgccaacccagcagccacccagccacaagacggtcttgtcccagtgtgcatccaaatttttaagcgtgtaccggacgcagaagtaatatagcacgaatcccacaaatgcgccaggcaggaatcgaccgagcgcaattgacacaaggtcataatagctcccgatcgagggcgggtcggacgccatagcgacttggaaccagacaatgaaatacatcatggagtagaatgccggtgctgatgtcacgaccaatgataagaaggtggtccagatcaaagtgaaggcgaagagcgaccaacgcgcatcagaacacttgatcggtgttgtcttattcgagtctggggatgaggcttcattctctagtcggaatgacattgggaagcttgagagaaactcgatactttcaattccatgctgcatgatagattggaagtttttctgctcgccggtgcggtgcaggataccacatccacccctcgcgtcatcaattagaccagcatgtagtgctgacgcgcaaattgacgaatcgccgcggtaaatgctgctgttctgatcacccacctccagtggcttacctcccacgactaacggccggtaattgagctcctggtcgccaacaacatacggctccagaagaatcgccgccgcacagcctgaggggcagcggaaggcgaaggattggtcctcgaatgggcgacaaaggtcaccattcagtccgcaattcgtagaattgctcctatatagatatggtcaggttcacaatatcaaatgatctacttagatataagaatagaaacacaccatagacggtggtgacacgaaagcttgacgggctgcccaaaccccggaacctcttggcccgcgacagaagctttgaagcacgcgaagaacacgacaatccaaaaaattaaaccgccaaaaaggagcgcgatctttgaactcttgcgcggaaatttctggtcaatcagacgcgccggcgcagcctgcaagctaggaaaccaagggttaatgtgatagacatgcggcggcgtcgggccgcggagccaagcgcagaatcccgagggcgtacaagaaaacggcggatcacgctcgaatttccccgattgagcctccatgccgtcgacttccgagggcagaagaggcaggttgcctgattctaagtccaagctcagttcatcgctgtcgcgggcttcatctttgtaccgcgatccgatctcctgcaagggatactcggaggtcgacaacttatcttgtgggggtgatggcgcacttgccccagcagagtccggtcgcgactgcatttttatatacaaagtctttacctgagctctggcgctcttagcgggaaggaagtgatggaattcctcatgttcaatgtcgaactagcaaccttgttggccctggaatttcttggcttttagtcatccgatatcaaattgtggaccctgaatcccatcttggacgtgttcaaagatattaacattgaatgcatagtctagtcaagctatatgctgtgaatgtgtctcagagtgtaccaatttagtgtcatgatctactatagaccgctatcacatgcttatgttcgcttgctggcttactatttacatagtttactagttagtttgcatttcatggattatttgttagatcgctaggctttgcaacgtttgtagaagcgccagctatatgagcaggcaatctcctgctcctgcacttgcttcttctttccttttccaccttagtcaccacgttgaatgcactccttctcttcttcagatcgacctgacgcctcacatttaggatgataattctaacggtgacgttgccgccgactctgttaggtctccgcctcttgatagactacaatgggtagtcaataaacctagtcacactccctattatggatataccatttagtaaatagtgtcagctccctatctaagtcccagccgatagaaactctaagatcatcccgtatcaggtagcattcccgatctccttcccccgctaagtataatagtaacaagaaccctttgtggaggttgcgaagccgatcgccactaagtcgtctcaaccaaaatcccctcgaccaaagctgatccttcctctagggagagagacctctagaccggtgaatacagcagcagcagcagttgccgctaacgaccgtatagggtgctacaatgtttagtcttgttttttactgattagctctgttctattctattaaaattctattaattagttcggcaaacaacaatccggtacctccgcatatgtatagacaatacatctttctagaagagataacctcatccagttcagcctacaatagtatgtatttctatcgagccaaatattctttatttcacttctttctccctgggctcaaaatacccatcgtttgagcaccacattgctctaggaatgtacagctaacgtacgttccatccggatgagaattacttgtttgtttcccgaatttctatcaagtcaggcattgcttatattctttagataacctttctccatcttatagtacaacttaatatgtccacctatagataagcggaatgaaagagaaagatctctgtatcatgtggaagagttgcttcttataacacaacctattcgttgtgaagatagagcactagtgagagtgaggaaaaaagacattgttcttaacacgcaatgtaatgactgttgaatggttgattgacgttgatgatatgtggaaaaaaggcacgtgatatccgcaagctgtcaagctcatgatttcctcattcagatttcttccctgccaacgcccacgatacccgcgtttttcgggtcgctgacttggtcaatccttcatcatggtgagactcacacttatcagctcaaatccacggggaaatccccatatccatgtcgagtcacgtcttgctaattcaagcccccgctatataataggcacgcaacagtgaaaaagcgcagtctatgctgttccgcttccgcgcgcagcaagcagccgacctcggaatcattgatgtctcacgcacccgacgccccaaagcgatcacgtccatcgatacggtgccagtatgcgagcgctggcgcggacaggtcgtcaaagaaatttcgcgcaaagtatcacgcatccacgtgcaaagcctgagcgactaccagatccgcgatctcaacgatgagattaacaagctcatgcgtgagaaatgggcgtgggaaatgcaaatccgcaacctcggcggaccgaactacatgcgtggatcgaaccgactttacgacgatgaaggacgcgagatccccggcggaggaagaggctacaaatattatggtcgtgcccgggagctgcctggtgtcaaagaaatgattgaggctgcggttactcgcgcgaaaggaccggcggaggaagaggctgtgtctggccgcggtggagatattgcgacgaggaaggttgatgccaactacttcggctatggtctcgatgaagaagatggtacgttattggcgtatgagaaacagaaggagaaggagtctgttgaacacctgcgccaccaaggagaggatgatgctgaagatggctggcaatctctacctggtgatgcgggcgacggggtggaatggagactcccgacgctggatgaggtccaggaagagcttgtggataggcggcgccgccgccttctggacaagatctcttgatttagatactgcgttcaagattccctgtttctatttctgtcctttgcctgggttcggcgttacaggtgcttgtgcaatatctccacatttaaggcatcattctctgtttcatcgtaatgacaccacttgatcattatttccaaatatccacaatatcccgaaggcggattcattatgtacaatattttacagatcgctcgttgttgcatccggtttgttctttcgagttgtcctttccactctcaaggcctgcgtcatgctcatgcgcggtgtttgcgtaggatctccccgccgttgttcctctgcttctaggtcgtccaccaaaaattgacctagctctccttgtctccatttctgtataaaaagaagtgcggctccatccatcattggcaccccgccttttgcgagcaggccagtttggcgcgcaaagctttcaattaatggaaccacatcattggtcggttccgaccagcgcttgtatactgatggatcattcaggtttatatgatacaacaagtaatccgccatggttatcgcggaaatgacattgtccttgacacagccacagagagccagcttgagcatattctctgcttctggaacatatggcataaacactcccggcgtgtccagaacgtagacatgtgatccgttctcacgatcaatgatcttcacctgcgtggctaccttgcgtgtgataccgggttgctgcccggttttcatagccttggctttgcccgtgcctgagttgcgtagattgttgatcagtgttgacttgccaacattgggcattccgacaactaacactcgacagcctactaacttatcgggagcttcggcgtcggttcgaaggtgcttgatgatctggctgacatcttgccgggaggacgagctggtgaaaaacacggcgctctttggatcaaaaccttgcagtttgcgttctatctacagcacttttagctgatatccagcagtggtctgttatctcactgcatagccaagaagaaaatacttactattttctgggcagatgatctgggagtgcttcccagatctctcttagtgtagacgaccagtcgtcgcatcttgcccaaagcttcctcaaacatggggttgatcgaggtcacgggagctcgataatcacgacactcgacaacatagtcgatagttgagagcatgcttttcatcttggtcagaccagccctgtggtgtcctaagaaataggaccgtggaatagccccataatgagggaatacattgcgcggaacgaactgggccattggagctcgttgaaggatagtgtttttcagtccggtgaaatatgattcatcttaatcggagcggtggatgatcagtctcaagggactggattgattcaacaaataaaatcgctggtccgcggaaggcaacaaaaaacccgtcaaaatgtccagggcggaagggcgggcggtgagtgaatcatgtgcagcaacttagggctttgcagacttccgtagtgcttcattctggagattcatgtttcctttttgcgcgagcatagctttccttctaattcaagctcaacagaaaacacaggttaggtcaaccctacttctaataataatttggcgcgtggtacgttcggctgccgagcgggagatggttaccaaagcccgccagagcccgccagagcccgtcgatgcttgccaaagcccgttaactgggccccctagatctctaccactgctactttttgtctaaagtgatcaccgtggtttagccgtgtatgtgacgcaaacagacaaaccccgaggcagccctgcctctcttgtccaaccccacccaatgtgtctcgggatttttcgttctacgtagctcaattgtcactcattttccacttgtctttctccgttttcctggtcggggtttccttctgccgtatgctccgacagcgtcaccctggaaggctcattgaccaacagtgtggtggctggtccacccaggaatcatacgggtatcttttgtatcagacttatgcaaggaatactgccagtattctcagagcacaattcaatttgaggtccaatgtttcaagtatctttctcagaatataatcttcctattgagcaacgggatcaaacacaatagtcaagaatacttcatttcttgattcgccggtccacgacagacattcgtaccatgaagagagggactatatgttgtggtttttccgttcttagtccgagatcacacctctttagccttaacccgacgaagatgtgcagctgtagaccaagggaaatgaccaacgggaactattagaaaactgttattgatatcagaaatagccgcaaaggcattataccaagccgaagacgctgccaaaatgccaaaaataccgcctgtcctctcaagtgcaaccggaatctcgccatgagagttgcattgaatgtgcgcaatgccgagtagaaggtagttcatgtccatgaaaaagtacagagagaacatcgcaagattagatttgagagtgcacaagagcatcagtgtagtgaagatgcaccagccctgtatacatacatcgttctcagtatcttttcccatgatagtaaatcttgaatttgatggaattggcttaccaacatgaacaggcccattaagagctcgttctgacatagtggatctactgtacttcttgtaaaatcggtatcgtcgaaagtcgagatcagagaaaatgatatccaataggcaccgaaagaacaaaaggtcgtcgcaccaaaagtattcccagccgccattcccctactcttattagcactaggcaacacacaaagcaggataggacataccacattccagccaacacctgcgctataccaccataactcaaagccaaggacatactgacccctgctactttcatacctcccacattgagggcgacacaattcgagaggaacgatgtcaatgcaaatgcacatagacccaggggagcgggattggcaatgatccgaacgttaacaggcaaagactgaagttccagtttgcacaatggtataggtgtctccggaatatttgatgggggcggagagtaatcacggctggcttgagacaccactggggagccaatcttgtcctgcgtactcggctggatgtgatggtttgatgcagccttggttctttggaccgtagtgacggtaatagtatgctccatcaatattttatatgaccaaatgctggttttgtgttttcgggaagccgtttagaggaaattgaggaataatatggccagtgaacagagaagaagggcaatggagatacatatacatatatatatatatatatatatagtctaggacgtagatggtacatacctctagaaagagcactcgaccttggtactatcccccagtgcacaagcaagctacagccaaaccccgttgaaatcgaatgatttcaatattccggaggttcacaaaagtggagtcgatttctacggggtttgaactgtaatccctcttccgcatagagagcgtattggattccccgaatccgggaaatatatacggggaagtcgtcgggattcgaggattagcattagctaataagaagcctatactcgggtagtgccgcgagaaacgggagctctatggcatgtttcactcgatcatgagatattcaaagactgttcccacaataatagagcatcttgcacgctgtgcactgcttaaccaatttattacaaattgctagcacgggtcaataccgtcgggatcgaaactaagaagaattaccaattacttcctatatacggagtacatcgtaggtatatgtgtcgttaatgtggggatgataacttgcaagacgaccaacgcactagaactgggggtttggcgcttggctacaagaattgacttcaccaaagtgcagtgatacctgtaagatataatatttgagattcaccaaaatgtatatgcaggctatacctaggctaggagtgccatacaacattggaggaaatgctaggaagttctacttgctccggatgtcaaccatgttgaatctgccggaggcttgacttggctatatctatattttgcagagcctactcaggctcctgtgtaggcatcgctcggaatttcaacaaataattgctatccagacaaaaaaatctagattgggtatcctggcttttataaatccatcatattgcgccgcatgtcatgaggaaagaagcagaacccccatctcacgacatcattcccaaaacgccacaatgcctgtggtctggaaccaaaaaaaaaaaacaaaaaaaacaaaaacgaaaacaaaaacaaaaacaaaaacaaaaacaagaacaaattaaagtatatgcaagatcagcagggaaattccttacacatcccaaggcgcacaagccttcaaagtaccagagcttatgcccgccagccctgcacaaaatcgtgcaagcgatcaatcacaacaccaaatatagcattgacactgtctgcgataagttgctcgaagtggcggatggcttcttcctcggtcatctcgagatggaagcgctccttcactttcaggacggctttatcaggctccactcgaatatcagggatattggcatcaaccatcaaactgaagaggttaaggatcagattggcagatttccgcagcgtggtgtaagcagtgtagcagtactgcttgaactgcagatattggggcgaggttgtgccgcccatgccttcgaccatttccttgcaaagtttcatcatgggcgcaaaaggcttcggatcacgaccaaggatgaacccaaagtcagcgtggaagaagtggccatctggtgctagaagcaggttttcaagatgccggtcgccaacgccgaggaggtacgtgataacgcagtatcctgcacatgatttgacgtatgtatccattgcttctttgcgaacgccaagaggctcattgtcatctgggttgttggcttgtagataggcaaggatggatttatacttggcggacgccgcggagagagaaatcgaggggatgaattgcacggcgccggccgttgcgctggtggcaagaattcgataaggagtcagtttaagatcaaggttctccttctgcaaaaggcgatccatcaagatgatgatctggatgaccaattggtcctggcgaagatcatcaccgactttgaacagcatcggataacgacgaccttcagaagtcttgaacgtgataagcaaaggggaaagagtggacttgaagacgttggattcctcggggtataatccaaccactgaaacatcgggatctaaaggtaggggcagcgatggatctatgttgatcaggtcgttatcagggtcacggagatattttttcagcatctcaatcttgccgactctgttttcgcgtgcgaagcgtacgtccttggctattttggagagcacagccaccatttcaccttggcgtaatagtgtctttctgtgctcaggatgaagcttctccagttcaaccatgaagtagtattcaacccgcgcaaacagccgacgctgaattgcatcagcgtcatcaaattcgaccatgagataccagtgtaggtagttgccaagcttgaagttattagccgcacgcgaaatcaagaaatgtgcaagcgaggactcctgcggagccgcatcaggttggttatccggagttgcgtcatatttcagagcttgcaccaattgaagaagataaagaagcaattcctcgtcatctgccttccgcagtgtttccacagcatacgaacggaccgcaggattatcaaaggtgggaccaagaatctcaagagcgtcgtcgacgtcaatctcggtccatttagggaacatttcaacagcttgccgcgattctccaacatcccgccagttgactgatttgacgaattttgtcaatgccttcttctcgcgtgtaagatgatacctgaaacgccacacaagatccttctcttcagcggtgaggtcttgtgtcggttcataggagataatcatattgagatcatccctgatctttgggttgggcttcaggtcacgatccatgatgccggttcgatggctacggatcaaacgccggtgcttgtcctcacacgggtttccgatttgaccaacctccggatcataaatctgaatgatattatggggatcggcgtttgagattccaggtccaaaatgtacctccggaactggcttgagggtagcattggggtgaggaggtgcattttggggccaggaggaaatgggcggaggaggatactcgtgatcggcccacacaatgggatgatcaaagcgtggaaattcgacgtagaggtcgaaatactcatcttcaatgttctcttcgtcagagctatcatcctgatctttgacgtgtttcggatctttttgtagggctgcatgaagttcaagcgcgcgcttttgagccgcttcatctgcatttgtcttcagtttctccaactcccgaaagagcaattgatccatccagtccacacgtgggatctcccccatttcgtgtttcttgatcaagacttcgactcgttctagttccgcttcttcgggtgactgctgtgaaggatcacgggtattcggcttacgacgcttaggtggtaaaacagatggggtagaggttgtagcagagccgtctgcgtccttgtgtaaataaaccttgcacttttgtctgcccattttcaatttcccgtcttcatcaaacaaagtgattgtagttccaccgaatgggacgtgcgtaatcctatcagcagcgagtggggacatatcaacgatggtgattgcgagctgagaattacgctcggcatccttgatagacatgggcatctccaaccattcattccatacgcgggcagttttgaaggccttgtatttggtcttcatgggcacgcccaatggcttcgactccgaccatatctgagcggtcacatagagatcggaggcggggtcttggacggaggcaatatgccgcagctcggcatttttatctagaacggtgcatggaatcggcttctgctttccctctaacgaaccactatagatgtgccggcatgagaaaaagcccaatgcttaggaatgtggaacttacatcttgatgcgtattggtatgtccacttgagtggtcacggcaaaggtgaacgcttccatctctgttccccgtttggagagagcaacaggtcgctgcgtcatggccgataagcaacccgacgtggggaggtcacgtggaaggtctacgcgacgcgacaaggcgttcgcgatcactaaatggagccacacgtctttttcctctatgtatttcgaggtatactctttgtctaaattgggctaccgtgtatagttgtactcgattagttgcccacttttttctttgttaaactttctttgttcccactctcatatcatctcgcactgactgctgatcgagtatggcacgtctcattcacacaaatctggacgaagcaaacaccccaggtcccggcccaacatcatcaatatcaccagactcatctacttctgataaagaaaatcggtatcaaggtaataataagagaactaccgttgcgatgccaccgcatgcacagggtaaacgacggcggttaaccgaccacccctcaaatacccagtctgctcgatctgctcagtctgcccgatctgggcagtcgcaagcatcgtctcaacgaaccagcagtgacacacgatactatgaccctgatcaggaccccgatgaacggagaattgtacggaggggacttcgagagctgggtagggagctaaatggtaagttgctttggctggacttgagactcgggtaatggtgctctaacacgtccacgaagatacgcggggcgagctcatgcagcctgggaatgatggtatcctcaatatagttgaacaagcaaatcaattctacgccaaagtgaagcagaccgccgacgccacgctcgattcgcgcatcctggtcaacaccgccgatctaacgcacaaaaaagccactcagctcgctctcggcgacacctctgctggtattgatgtagacgagtttgtctctaagtgtgtatcgttcatgcgtcgcggcccaaacaatgcgacggcttcaacacagggacgccgagggcgtcttggtcgaagccaaagagaccccgatgccagtgacgaagatgatgatggtgatgcgatgaattgggacacgcttggccgatcggcctgctttcctagcaatgctcgtccggccgtgtccggatggttgctggggccgctgtcagtacagaagcgtacgcggcaaatgacacagcgaagagcagcagaggttattgatccgtcgcaagccgtggcacctcgagaaatggcacagcaggatcttggtcaacaggacagcacaaatctgacccagatctgttccgagatcaacaagctgcttgccacgaggcagcgtctcagtcagcatgcagttgagacagagcttcgcaacgaagtcaatctcacaacagagaaagcacaaaaaatcatggacaagcatagcgtagcggacgacggaggaattcctttgtttcgcttctgtatcaacccacattctttcgggcaaagtgtggaaaacttgttctacgtgagcttccttgtgcgagatggcacagtgggtgtacaaacagatagtcgtgatttgccgaccttgcgtgagtatttttcaacatgactggttgatacagcactaataggttgacagatgcgtccgcgccgttcgcccccagtgaggcccaaaagaaaggcgtgcaaaaacatcaggcggtttttagcctggaccatgatacgtggcacgaaatcatcgatgttttcaagattaaggactccatcatcccccaccgaaaagaggaggagcaagagactggcacaagttggtatgtctaagcttcttctgaagacacgattccacgagtcgatgtgtgttttgcaagatacccctagatcttttgacttgtatttctcgatgaatttaataatctagctttatactttgaatatgtcgtattctgtggcatctagcacaatcacgagtgcgacctgtaaagacacaaattggaaatccacaacgatagacctatactccttacttagataggatatatgcccgagatctatttcaaaatgtaagccacctatatgtacataactacggagtacataaatacggagctattaagacaacaactatgtaggcctggaaccctccagggctgcccaggcgggccgtaccaccgtccactctgacaaagcggataactaagctcaggttcataactacgtcattatcaggctgtctggcttcccagcgaacttctgaagactgatccctactcttcaattgtttaatatttaagaattgaaaatttctctaatttgttactgcaaggacttgaagatctgtagctccaagacacatcaactgagacatccaacgccagggaaaacacaaacaaaatcaggaaagccgccaaaatgccacagctctttccagccaacccttcggcgactatggtaattcgccatgtgacaccagatatcgtgaccatgagtcttccttttgcacggttcggacgcctgcagttcggcgggcgagggacattgggtgagtgccgactctacagagccaacctaccaggcgcatgatacacctggggacaggggatgatgtgcagtgatttcaagcccatgggggtccttgtttaagatctatgctgactgttcttgcatgcgacagtcaagcttgccagcggctccctcgcagtattctctcccgtcggcctaacgtctgaagtccgcgagacagtcgagtccctcggcggaaacgtcaaatacatcacggcgccagatatcgaacatcacctcaacctcaccccgtggaagaacacatacccacaagcagagatcctagctccggagggtctatacgagaagcgacaatcaaacccggaattcaaggataccccgttcaagcacgtattcaaaaaggaggatcaactgccacggtcgatctcgaaggagttcgatgccgagtttgagagcgagtatgtgtatggtcacgggtcgcgtgagctggtgtttttccataagcccacacgcacagtcatcgaggcggatctgctctttaacctgcccgctaaggagcagtattccaggactcccgaagccgggactaatttccttaccaagctgattatgccgctgttgtccaccaagccaccggctacatggcagaggcgatttgcatggtatattctctcgtcacaggatcgggcggcgttcactgagtctatgaaaaggattgatcagtgggactttgatcgtttgattccttgccatggtgatactatcgagactggcgctaaggggatatttcgtgatgtgatggcatggcacttggagcagaagaatacgtagtcttctttatcgaaactattgtaacagatgatactttcattttgactcgggtgttgtggatgggattgcattggtgtgattttctttttcggggacgttgtaggcagcattattccaaatttgatcttctctcttggctctccgaagtgggtatgtatactccatacatattctcattcttgtcgttgttgctattcatagtatccatggcccactgataggtcaaatagtaaactttgcatcgcccgcatctttctaggatcttcctgtatgtatacgaatgttcattgctgcctagttctgctatttccacttctcatacgtgaaatactacctactatgtagtgatattatactcataaaaaatcgtatgtttagctgtcaaatctccgtttccccacgtcatagggctgagaggaaaaagcaagtcagatgactcaaattaaacatgatgtcagaggtttaaaggtctctacgctccagcccctgtcacaaggtacggagtagagaacaacatccacctgtcagacagcaacaatgatcgccctgggtggagcccaacccaaatcccggaccaaactactctgtagagctatcggcaatagtcgctaggatcggcagtcgaagagcaagccacggaagtatacaaagtattccagcaaagaaaggcccgtattccatgccagcacatcgggtggttttctagcacggggaggctgggcctggggaagacaaggatgacgatatggttaatttggtcgaaactgcgtggccctaggctcgactttcgtggcatttccgtctgctgctttaaccagccacaatcatgtatgtatacagctcccatcattgagaggaaaatcttataacgccccctcagaatgaaaaccagcgcacatttcttctcaattttcttacgcgcattgggaccaatttgtttatccttcacatagttactaacttctcaaaatgactggtttgctccaggaaccgagccaaaactgacttcaagcgtcagaccgagaaatcggtttgtccggggacactttgcggagtccatcaagctgggattgaatctgatgacaaccctagctaggtacaacagagctcgatcctaggcaactatagcataccactatgatcagtgatacatagtatacatagtatagatgaatagactgagaaggctatcgaaagcattcaaacatgttgagcgttagttaatatgagttcgatggttagtggtgtaaagacaccacagtcaagaccttgacctgcctccgtacaacatcctgtattgagggtactgtacatgtacgccttcattttcctgatggctctgtagggctactccttacgccgatcgggtggcgattggcattcagccacagtccacatcagcggtcagtccaccacgaaaagccgatctcttacccattcaagcctggaaaacggttaggcacgttttgttcacaatttcgaccaatcgtgacctctgcttgttggaaagaactcgctgtacgaagtatacgagattgatctgacgacaccaggaggcttagattgactctattggtcgcgcctaatgcaagctgtgctttgtcttgaattttaattgaatttcctttttctaatttattgacttttcacttcgtcccttgctttaaaagacactgtcgctccctctcgaggtttgctcgtctgtgcaacctaacacgttatatagcttctcgcgttccctaacctcttatcccacaccatatcttcacgagcttgacacattatctccttatacaatcacatccttccgatttatgaaagaaactgctcattgatctgacaactcaaaaatgcccgtcatttcacgcctcgcgtctatcatcctccgcgttgcggagattgcctttgcagctgtgaatagccctgatcaagctcaacttattgaccgcatctgactctgttctaggtcgtcgcaggtgtcatcggacactaccttgcccaggttaaccacagcggcacagatattgactggtggcctcagtcgcgatggatctatactgaagtaatcgccggcttatcgatactgctgggcctcatatggctgatcccgttcgcgtcgggattcttctcctggcctcgtatgtgctggatatacctggtgaatatggagcaatacttactggaatatagtggacatcctcatttcatttgcttggttcgctgcattcggtgtcctcgtcgacaccatccgccgcctgccctgcggcagcatctggtcctggcactttagaggggaccagacatgtggtcgctggaaggcagctgaggctttcagcttcctttcagccattgtctggcttgcttctggtatcgtggtatgtgatgagatgatacaacccacatgtgaatacggactaagaaactctcaggggatctggttcaccttccgtgttcgccaaagcacctctgacggagtgtaagtaaccaatgacatcttctgataatagcttcttgattgattgatactgatatactgaacagtcgccgccgccgctggggtcgctccgccgtctagatgttagcatcggatcttcaaatatctgcatggcagacggtagtccgtcatacactaccgattatgcgcattgcgcctcccgttcagcacaggataagtgacatggatgttttaatgatattcttgcttctttgttttcctgctttcctctaatgtttctatgtttgcctcatgatctggaggtcaacgaattacgacttacgttgatacccttggtgagataatctattagtgattttgtgaaatccggctattgagtttgctgttctatcgctttttttcatctattcttaatatatttcttatttggacatcattgtctggattgtacagcagctacggacgttgccaatggttctttttacatccacacaccctcatctagtttccaattcccggcccaaataaataacaaagaacaacaaggccatttttctagatctatcagtccatgtgtttcatttttcgtctttgtcgtctttcttgttttcctttattagcttttttattcattcgaaataataatcttaacattgttggaagtgcaacgtacgaaagatataaatacgccaggtcgagccatgatacgttatccctcgagccgaagcagtttttgaccatccgttcttgaccttcgagttaggaattcatcttccctgatcagcgttgccacagccttctgctggcttcggatttctgctatcactgagaagccatgtcagtgatgctagacaccacttcggcccggctctttcataccacgcgcattggatttcaaacccgctgccagcaactcattgacgacttccttcacgatggcttatcgcttcaggatgaattccatgatagggttgatcagctccacctatcattggaacaacttaagcgagccggacagatgatggccattgattgttcgacaaatgagcttgtggctgttgtccctattggatttttcaccgtcctgatcgagcgtcctggccaggacccaatggccgaatttgattgggcctgtatttacaccactgacactttgaacatgctgacgagtgagtcttttttgcgccacagggcccccgctgatattgcccgcatcctcgagacgcagtcattcctctgggatttggttgtgccgtttcctgtaacgctttcctgtgccgaggattccgccccagacccatatgtgaatgctcttcagatcccccccgctgctagtctggctcgtatgaactctcagattccggtgagacctcgccctactcctcctgttgacacttacatggcttacaaccggcccgtccctggtccttatccccctgctttgcctccacgatctgtgtttgagtcggagcccgagtcggatggtgagtcccctacaggcgctaacgctgtgggtctttatggaaaccccagcatgcatcctcggtgaactcttgttattcctgtgttgatttccatcattcccagtgttcgagaaccataggcacttttcgactttcagtagcaaaagtcttgatcaatgtattgagcttctcctgccagaactaatggatgcggtggaaggctaagccacccttgagataattgtcatcctgaagatgtttctatcaccagatcattccaattcttcgataggaagctgtagctgtccttcatcggtcctctgaacgtcactagaagttaggtggacggatttgggcatccaggagcagggtggcaggaccctatgcgagttgccgtacatggtgtggccagctcattagttatcaatcccctagtaatagccaagcgtccttgccaacatccgaagacagaacaccgaacaaaatagagggcttagtgagttgttacattctcgacattgtagatagtctagtccacccgtggagcatacatatttactgatgaacacgaaactgaaacaaaaatgaacgccggaaatcgagaccaaggaataaaagcttggcctttcaaataatatgagcaagcccgtggccagctgaaaagactagaccatccctttcccaaatgcaaataaacctcattaaaacatccctccgtaatcaatgttgcaactccgagcaggattagcctgctaaacataaaccaaaccctccctattcacaaaaagcccttggtgttgctgggttgccgctggggaatgtcattagatccatagacaccactcccgcgacggcttccagtatcactgaaggtcacaccacgcccaataacactgcctcgctcaacgcgcagggctttccagccctccagctcgcgttccagccgcaatgctttctcacgctcctcgcggagatctcgctcggcgcggcgggccagcagctgggcgtccgagtcattatgctgaatctcctcgatattgcgaaggagccgttcaatcttgtcccgagctctgttgacctcgtcagtcagctgagtgttcaccttgtctcgcctgtcaatctgggattggagatccttgacggtgcgatcaacattgcgaagagagcgctgctcggagctgtgcttgctttcctgttcttcgaggtgggtctcaagctgaacagcagggttagtacggaagtcacagagactgagcatgaagccatttgaacttacctccttgatccgcttatgcaagaagcgaacatcctggctaccagaggaataactcttggtttcgagatcgagacaccggagttgggcttccttcagctgcttctcaactgctgccttctccttgaagagctgagcattagcctcccgctcagcagtgacctccttctgcatttcagttgccagggcgtctgcacggcgcatctttccaaccgcggcggcagaaacatcttcctgctgcgcaattctagacttgagctcaagaagctcgcggtccatactggcagcgtttcgcatagatgggctttcacccttggcaaggtcctcaagtcggtcgcctgcttcggccaatcgaccttccagcatcttcttgtccttcagaagcatatcacgctctgcttgaacatcctcaatggaggtccgaagggtgcgcacctgggataggagtgagacaactttactctgagcctcgttgtgtgcgttgacagcttcgtcacgagaattggtgacatcttgcaggacaacatccatccgagatttttccttagcccatgttgagctattgagaacttcgttgtcccatttgctgcgaagattctccagctcctcacggagacgagaagtctctccacggccattgagaacacgctcacgttccatctcgagttcgttgttgagagtagagaattctctctggtacttttgtcgggtctgctccatggaggtctccttgtcctcgagatcaatcgctcgctggttgcggtaatcttcgagttcattctggagacgttgcttagcctgcaaggcaccttgaagttccgcagcttggtcctccatcctagcctcgagggactgtgcctgtcgctgcaagtcctcaacaagcgcatccatctccttgcgctcagacataatctgagcgcaggtttcttcggcttcttgcccttgggatttggcgaactgctcggcgcgggaagccttcataactgcaatttcggcctgctcgagtttgttgaagtattcatcggagcgactcttgtacaacatgaggcttgactccagatcagccgatctcgaagactcggcatctaggcgaatctggagatccgagaattcctgaagaagctggttacggctaactgcatcttgctctctgccgacttgcagctcttgggcctcggaaagggcatcacgaagttcaacctccaaggtggctctggcgcgcttcaacttttcgaactgagccttggcatcaccaaattcagtcatggtttcattgtgaaccttgaggagtgagcgcctagattgctcttgtgagttgataaggtcatatagttcttcgtgcgatttagcttgaacgtcgcgcagggacaattctccggagcggatgctacgttccaacgatgaaaccttcttggaagagtcgtcgagttggtcgtgaagacgaccattctctcgctcgagaagctgcatgcgacggattgacggactttcgtcctgccatatatcggcggtgggagtagagcgtccaagctggctctggaggtgcttgttttgcatctcagtcatctgaagcttattctgaagttcttccagttcagcggctgtatccatacgcctttgataggcctgtgtgtccactgttcggtcggacctcgcggagtcattcggtgcttcgaagacattgtagcgtcgattgggagtagtagggttagaatatttcttagcagcattttcggagttcttcctgaggtgagccggggtacggttgttggtcacttcgttttggtcgatctcctcgagcaaagcgcgcttagatgatgaatatttggcgtcgagctccttcatttcatccccatgacgtcggcgcatttcagcaagctggctctccgctcttgcgtacttctcctcggtaaccccaagcctgttttgaacagtttcaaggacttgggccagatcaactttcttagaaaggtgtggctgaacagcctcccaggattgagctggctcagtagcctcaggctcgaagaccttgtgtaataggatcaattggcggtgtaagtcctcgatctctttgttcgccctatcaagtgtgccctgggtttgacgggtattagcttgagcttgattgcgaagttgccgttcggtttcgagctttcgattggcctctgctagttgcaggttcgccgctgaagcagccttttcagcattacgactggttttgtgctcgcgattgacctcatgattcaaatcctccaaactcagcgacaacttctctttctgcttctccaaggatcttatcatgacctgcgagtcttccaactgacgactcaatctcttggtctcttcgtcgagcctggacttttccttttgaagggttgtcaaacggagtcgattattatcactggccttcgagtttgatcgggcaatatcaaggttcttttgctgaatcttcgtcaagagtgacttgttatcgttttcggatgcagtcagcctgcctctgagagtcacgagctctcgttcaagacgctccttgtgctgatcatgacgcagacggaagttttctgattcagagatcgagtgcatgagttcttgaatccgcgctgagagttgtgatcgttcagtctcaacttcttcaagctggcgagccttctcctcaaggtcctttcgtgaacttgtcatacgctcctcggcctggctcatgatttttcgttcaatctcagcctcggcattcatacgggcagtttcggcgtcggtgaacctctcgcggagcttgatcaattcgctttgcagttctttcttagttgtttccgctgtaactcgtgcctccgtagcgcgacgcaagctatcttgctggatgtacatctctttctcgatggtaatcttagagtcgttgagggtctcatatttctgagtcaacagtgcaagattgtgctcggaaagcatttgcacgtcatctcgtgactggcgttctcggctaaggtcggcttgagcctggaagagatggtgcttgagatcatttatttgttcctctagcagcttcctactctgtccagcctcggcatcctccgatctcttattctcaagcaaattcttgaggtccgcagcttcgcgttgaagttgcctctgttcggagcgcatggcatctctctccgcttgtacctcacgaagtttagattgcatgttgtcgtggcgtgccgcaagggaaattttttcggactcaatgcttctcttttcttcctcgtggatctgaacgtcgtttcgaagaactgcgatctcgctctcctttcgacgaagtagttcttcgtagctagtggaagtactcgagagttcggcaatctgatcacgaattgacctgttctcttcggtgacatcgcggatttgtttcttggatttatcgagttccttagaagtatttgcgagtttaatatcaagatcttgatcggtcttcaacaatttggcttccaggtcttgaagcttacgatctttcaagctgaggtggctttggagtatcttgatctcttggcccaattcttgaatttggaggtcttttccagagaactgagcctccgtttcagaaagcttgatatcgagttccttgactcgagaatgcagactgttcttttctgactcgagttgctggatgatcaaaccggcctgttccagctgggtaatccgaagttgcagctcgtcgtcaattttcctcttcgcaaagaccaattcatccagttgctcttcaaggccttcctggtctgcgattgcaccggaaagcttatcagcgagctccacttctcggtattgcagtcgcttgaaaatctcctccttgtccaatgcaagtgctcgctcactttccaaagtatgctgtatcttctgaatctcgatctcagtccggcgtctttcttcgtccagtttgttgcgttcggcaagatcctgtttcatcttgatttcgagttgctggatcttgtcgtcacgcttcttgacttccttcgcatttctcgtgtcccccagtagcggcttcatccttgaaaacatgcgccaccaagggctccccttcaaatctaggtaagcgtggaagttctgttgaataatcctggttgcctccgcgcggtagaggcgcttgttcgaaatgcggcgctggacaaatcctcgtgccagagattgaaacttagacatgatagttcggatgagttggtcacgtttctcttctaagtcggccagaacacctgctctgaagaaaactttggtgcggccaaccctgtaccagccccgatccataccaagctttgccaacatagtgcgagcaatagtctgtccctccaagtaccccttcggcatatcctggcaaagaacctcataacgctgtcggaactctgtgaacggcaagcggttcgggaatccagtacgagcgatcctgatcccttccaggacaccgttgcatcggagctgatccaagaccaatggagcgtgcagcatcttcggacgcttcttatgattaggtaggatacaacggacgaaatgagggtgggtcaggtggagctgagccatcaagctagatagctgctccttgtgtctttgggcaaccgtgcggaacaagcccttcttgacacgactcctgggatggttgccaccatcctcctctgagtctgcacagtcagagaacagatttgctacgtgtggtgctttcgaggcggccaacaggcgtgtaatattgtcgttgagcggatctttgttcttctcaagccaatcactcgtgttgtactcaacttccgcggcgtaatgcgtgagaatgaagccctggttgagacgagaggcgtggtactttggagtcttgcggtcccaaaggctatggagcttttcggtgaatgatttgtccgtagctttgggcatcacacaatcttcatcaagacaagagaaaatgccaatggggttggtcaattcgataaggtcgattgttggctgcaggtcctttccgaagtcgatgaattgccactcaatctgctccctcgcatattcttcttgctcaagaacaaacatatggtggttaaagaattgctgaagtttctcatttgtgtagttgatgcagagttgctcgaaactgttgttgtcgaaaatctcaaatccagcaatatcaaggaccccaatgaaatagttatcgtcgctagccattgagcgaccaagctggccattgattctagcgacaagatttccaaatccgcgctcatagattccctttgagagggcatccagggccatccggacctggtctggtgtctggaccttctccacccattcccggccggccttcacgcgtggatgcagaagacccttgacaaaagcttcggcctcaataccaagaaggtagcaagccttttccatgctggagtatccctcaggcgccagagttgcctggtctgctcgcatactcgccttcgcaacactcacatttcccagatgcagaacagcagcgatagtccgcaggatacagagctgatcctcgtcatcgaagttcatcacatggaaagcttcaatcaacgagttccattcttcctggtcagagacacctacgatagagtcatttccgtctctcgtataggcgaaatcctcgatctgaaggtccgctaggagaagcttctcgcgtgtttcacggtcagcgccctggagaagctgatagaaaacgtgatagtttctctcgttggggttaggcttgacgactcttgatttctcgagcagataccaatcgatcaaagctccagagatttggcctgcgcgagagaattcaatgcgaataaattttccgaaccgggaggagttgtgatttcggaccgtttgggcgttaccaaaggcttcgagaatagggttggctcgtagaatctgttgcgaaaggccggtgagttgcttcgctccggaacgaccataaggcgtatcagaagtggcgacagcagcgaggtactggatgaccttcttcgtattttcggtttttcctgctccagactctcctgttacaaggatgctttgattctgtccctcctcgacaagattccggaaagcctcatctgccatggcaaaaatatgaggtctggtctcctctctcccgcggcccttgtacattttgatgtactcattggtgtagattggtagtggacagtacgggttgattgtcactaggaagagtccagaatatgtctatacagtcaaaaagtcagttaaaatcacggatttgtgcattttcctgggcgtgacgaacatatattaggtctgactgatatctggtatgcaggttatgcaccacagacgcctcgttcagatgtgtgagttctgccatatcatctgccttgtcaaacttggcaggattgactttgtcgacctggtccgcgtctagttcttgttgctattctagtgtcagcgcattttatccttctcatgggatcacatccatacatcaccatcgtcggtctgcaccaacagtcgccctccttcaaattcttccagaaccagaccccggacaaaagccttttgagggtctcgtatccacacatatttgttcccagaaaagtcattatctccttcgagtccacgaatttgatccgcgccccgtcgtagttcctcagatttaatgaaacttggcgcaaatgttccggaggaaggactattctttgcggaattcgatcgctcgcgatttccacttagggataatgatggcgacaactgtgagacggacgtgttgcgcagatgacctctcgctgactccagcgcattcgatggtgtaatgatggccgatttaggccttgtatgtggggaatgtgttccttgtgaagacgatggccgtgcaaatagactggcacgctttggcgagccgttcagctgggagggaagcatggtgatcgtagttcaatgggacattatttgagcgtagggatcgttatcatagccaagattatttccacaatcacggtcgtaagtgtagtggaagtgagagtaggagggcactcgagagaggaggtgtcaaatagaatacaattaagagaggtgtgaagttggcaaaaagttggaagaaaagtaagatgttcgaagtgacgcacccgaatgtccatgctgtttgtttactctgcgttcctcgggcgcccgccgatctaaggtggcccgtgcgcgcgtcacgtgagatactcgatcatttttgtcgatgaaggcgcttagaccttaaaagacgaccgcgtatctcaattcttctcgagttcaacacctttattcatcattctctcgtcctataagcagaatccacagtcgtatggctctttcttgtttctaaatcgccatcagatcattatcacccctccacagtgactccaaattgaagttctgcgtatccttttcccaaagacctaccggtacctctccacctgtttaattcttcaagacaacatgagatttggtctttgaaattgcaacctttcttgaactccagcctctcgcttttgagaatcgtagagaatatatctctttcatccctgcacacaacatcatgtccgagcaacctccctcatacggtggccattcaagctatgcacagcaatggcctcctgcatacccttcgatgattcccgcgaactttcccagttcagagtatcctcaaatgcatcagccaacggcgacgaatcatgggccgaccttcgactataacatggcaagcgtcaatgcgaattcgcgagttccaggttcaaatggtgctggaaacttagcattcattccgcctcagttccccttcttcaaccacttcgatgcatcacaatttccacctcatttccctccaatgccgtttcctccgatgagctatccccctatgccaacagggtcctcacatccccccatgccgtatcatggtatagacggaaatgtcacacaccaactatcaacgccagctgtacatccgaaaaccgcccaggttcagccagataatcaccgcgaagaaggcgaagttagtgagggatctgatgaaaggtcactacaccctacgacacgcaaggctacgcgccagtattcggacctagaagaaggagaaactatatcttctagcgcgcagtccgttagaagtagtcagtcacgtattactcccatgattccccgtgttcagttatgttttactaataatggtgcagcatacgaccctcctttgtcagtctcagcagacccaagcttagttcaccgtgcgatgcagcctcagcggcaagacccacccgccactgtcccagcccctccacctcagaaatcggccgcgcagctacgaattcaggcccaaggcgctttgcttagcctggcgccacataatatccggtataatgaactggtcgctgagggcatcaaccctatgatcttgaaacgcctttacgaggaagtcggcatcaaggtcaccacatcatctgggcagtctccaccagttcctgagaaggcctccgccgtggctgcagttgccagcaaaggactgggaactaggaaaccagctgaggtgcccttgccagcgccccaaccttctgcccctcccgttgcccctcctgccaaagctggcaaacctctggagcgaaaggaacttatcgcccgcatgctagctgagaaagctgcgaaggtgacctccaaagaggcttcaccaaccggcagtgcaaagtcccaccctgcgatacaagttgatgaaccccgcccggttccaaaggaaacacttgtaaaggagaagagcaaagcccagacggagttggcaaggcagcgaattgaagaactcaaaaaacagactttactaaagacccagaaattggctcaggcaaatctgccgccgatccagttagaatctccagcgccagctatccaacacccgctccctcttcgacctcctgttcctgaatcccgtcgctctgctgggcttccaggactccttatgactggattggagcaggagccacatgaaactcttgccgctgagccggtccaacccataaacattgactcaacaccggtgtctcaagcaacccaacgcaagcgacctctagcttccgatttcgatgagccagttgcgcctacgaagaagcatttcaaccacgctgcgaataggttcgaccctactgataagctcatcattgcaattagcgacgatgaatcgctctacggtgatgatgaggacgatgacatggagttggattcgagctcagaacaggaacaagccccgatagtgacctcggctttggtcaagcctactatccaattaaatcctcctgtcacccgggcttcgacggctacaccacaagccccttctagtctaagtgaccaaggagacattcgacttaaagatatggaaattcaagctatgcgccgcaagattgcggagctggagctacgaaggaaatcgaagctcgctgccagtagagcccagtcacctcgcaccctagatgactctggggcatcatcatccagtggacaatccagtgggcaatcaagtggggtcgctgcttcttctgaagaaggtaaagttctttctatctcttttctctctctctctctctctctctctctctctctctctctctctctctcttgctatgacatgttcattctcaagtgctttcgagataaaactttgcgtttcaactaaccattattcagattcttcaaagacgaaaccgacaacggccgcacctgatatgattatgcccgttgcgccccttgcccaactggatgcactatccgaggccgctgccaaccgagaaccgctggaagaagcctttgctgaagaagtggcaaatggtgtaatcgatagcgccgcacagacatcggcttcattcgagtccgattctgctaggtcagctatgcaagaatctgatgatagcagcagtgatatttccgattcgtccagcgagagtgaggacgaacctactacctcgccagcgcaactcgatgtcgaccctgctactgtgccgtcattctcagagcctatggagattgactcttcagagcgatctgtatctcagagctctccctctgctatcacccaccctagtgccaattctgccgacgaacacgtttcccaaaatcagcttagcgaacaatctcagcgtgaactgtctgcggattccgacggttatgagcccccagagcctgatgctgacgcacagtctgagggctccagttacagccctcctccattcagtccagctatttccggtctcgtagaaaacacaggagtttcggcaccatcatttgacttggctcaagctgatgaaaaactaacaagcacacctcaggtgtcagactcattacgtcggtcggatttgcaggttggcgcttctggcgtatgaacactacccttctaaaaaaagtttttggtgaccccatactgacccctatctagactgaaacatcgtccgccatttcggagcaaagattcacgccgtacactagcccactgcgaaccttcaaggcttatcgataccacccgcattatgccgccgacgttccgagtggctaccgctcgctaacttacagtcataatatcgattccatgaaatacatgtgtccatatgagttggccgggggtgtctgcaatgaccgatcctgcgagtttcagcatcttcgggacatgactctaagcggtgcgtcgacatgaacaacgtgcaacaccccacctcgtcctcgagctcccccaccggcgtattgcactatctagtctgtttttactttctgtttattgctctactgccttcgtctctatctctgcctctacttccttcccactcattgccgtgtcctttttgccctgttcgaatgctgaccacagccgttaacctcgacagacgacaagattctcgtccagatgggctctgtccgagagggtcaaaccgaagaagaaaaagaaaaatatctcgctggtctgaaagagatcatcaacgacttacggcgtgacaaggtgaaagatttcaacactgtggcctccgagatagccgcataccgtaggcgcttcctccaagacccgtcgcgtgtcttgtccctgtaacattctcccaccctcattcattggaccctttcagtgtcctcttcaggtgagctgtcttctaccagtcttgtgaacaccaccatcgaagttctttcgatggtgggggaaaaacatcatcacaccacatggactcggacaatcctcatcatggccatgacgccatctacactattccatgccaccgcctctttttaggggtctcgcgttcatgacctggcttttcctctgcatcattagccgattcggcgttttcttccctgcattccaatgcatttgatctacgcgtttgggggctcgcggtctttggggtcacctttctttttccctttttttttttgttgaatctaggctcttgcctgcccattggacccgacaaaaacggtgttagggcatctgcatctcagctgctggtcgtaactttggcagtttcggcagtctctgctctgaggcaactctggctactgctaatctgccaccgaagggtgcggttgtaccattagaatctcggcagcttttcgcggaacatattcatagcaatcagtcaatatgtatttttttctatccaaccattgttctttttgtatcttcggtagtaatgaagtaagcatgacctcgcaactggcatagattgcgtatgagtaaaaacacgctaaaaccattaattcattcgattagaacatatcgtgaagtaaaatagaataaacccttcagctcagggaactccacaacccaaatatactgcagatgcatattttcagccgtgctcaactgagctgagaagagcaacaagaaaaaaaggtcaaatccaaaagccaaatccggaggaaatacccatttcccatacaaagtgagaaaaataagaacaagaaacaaaatgtgggttcctgcggctggtggatgctaagtatagcacgcagagtccggtcggggagatggggccagggctggtgtgacagtttcaagatttagatattcggagataataatagtaatagtcatagtgtacggagtcatagagtatggtatacggggtgatatttttaatattatctctcttctaatcaagaatgtaaccatgacatcctgtccctattccagaaacagatctatacgagttgactcaggacaaggcagatctagcggactaaatgtcttggattcgacagattcttgctgattggtccggggattcctcgttttcggttatgttcctcttcttgtatggacgtacggagtacatcgtaggttcatggccagcccgagatagatcacgcaccctgcgcccgagagtgaagtcagtgaccgggcgagcattgaaaacctaaggaaaatgccaagcgaaatgctagtaagcgggatgagttgtggatatggcagtaatctgcatctttaaggatttactgggatgacaagcgcgtccatagaaacctggaagggaacccaaacccgcggggcgcacagtccagcacagcctcaacgtcgagaagggaaagtaagtgcccaggtgggggctacgacaatgactaagttgggagctggatacggggagagtgggaataacatcatagagcatgccatagggggctgagtctgtgtcagagtagagacataagccctaaataataggtgaggactaaaagggtaacaaagatgcaaaggccaaagaagcggagaacaacggggaatagacttcgtttgtgttagcctccgagaaccaagaccgcttctctctgtatgagccatagggctgtttgctgcagatgccaggctcaaggagcggtaacaagaaaagaaaagaagctagttcatcctgacatgcatacaaagtacatcacttagcatatcggggtccattttcggctgagccgcaaatcatttcaaccaaccatgacaactggataattcgaggccgtgcttagaacagggggttgctgcacgccgtgaagatcacgatgactctacaccttggcatctaaggagaaaagaaatgtagtgatgatattgatgctgtatcaaaatgagatgagagtgaaaatcaaaatcaaaatcaaaatgaaaatggacaaggcagaacagcggagaatccagccccgctagcctcacgctaacccaaatcaggaacccgcaagtatacaaaattctagtctaacaaaacaaaaaaaaagagaagcatttacaccaggatatatgcccatgacccatgacccatgacccgctttgcacgctttgcataaaagcattccagaaagaaaaaaagaaaatcatccaaaaaaagcaacagagttcggaatcactatgccgagccgtcagcttcaggaatcaccgaaacgctgagtgagcatcggagtcacttaccattgtactcgtagtacccagtctcggcccgcaagatggcgtttcaaaaagtctcacttgatgcgcttgcactcgctgcaggcaatgtggctgcattgaacacactggggctgatggttgtagactttaggcccgtctccgcatccacagcagatgtacatgtaggtggcactgttgtacctcgtccctggtagtggtgttgttgagaggtctgtgtagtcggcacgccgtagaggccgtagaccagggaggtctggtacgactatgggcatggctgtggtcttcaatgttggtgtgcgaggagagtgcacggtaacagcagttgggtatgcagagactggattgcagtcgtgggagtgcgagtggacgctcatattgttggagaccttgtcacagatgcagcgagagcaacggggctttccacactcgatgcaggccatgtagagggcggaatcgtgaggaccaaacttgcagtcgcagcagtaccacaaaaaccccattgatgttatgggctggatgaatatggattgtattggtggccgagacagaatggaagactgggtggaaagcagagtgtccgattctttatagttgtagagcgggaaccgtgtctgaactgatacttggatgctaattgagtttgaaatggaattggatttcaagcctggggatcgtgaaagctatatacctcaagaatattagaatagatgtaacagaaccagaagcgcaaggcagcgttcctagaacagtcaacagcccaggctgccttgccagatccacatcgggttaagctaaattcattacccgggcagtaattggggcaatggatcaaagttgaccttagttgtacatcatccggcgagatgggttgcccaagagagtgtggcttagtgtaatccggggctgtcattgcccaggacaccacagttgcgcctagaatgtgaggaatctatgaatcatatctgaagaacaggtcttttgagtcaacgggcccactattccaggctaagcaaatgcccacaccgtctccaatggcctggcttaccccgagaatgtataggcgtcaacgggttctggtccctcgggtgcgccgaactaacggtctaccatcaggtcggatctcttttgggattgatgccttggtatgtaaatgatgttgatcaattggtttccaaggtgtgatatactccactccctcctagttttccaggcaccggctgcttcgaaaagcaaaacgaagagtcatcgagtcaggtgttgtcgcgcccttcgcagtgttgcctacgcaggctttctgacagcctctgaatatgaagaaaaatcagtttcatcattgtcgtttagggtattttttttcttacgattaacagattacgagatgctgtgaaacccgaaggctgatttctaatctaaattctcaccccgtgggcccgtagaaattccatgccgtgtgccttcctagatactatatcgagtcatatcgagtacaaccgtagcaccgtcgagatctaaaaagagattagagcatgaggtgatctgacattgctcaccaggccctatctgacggtcgcagctgagatctacagaattagcaatagtaggcccgacatttcccgtatcaacacggtagctgaggtcgttggtgaaaaggcaatatggggatgtttcaaggttctcccgatgccccgatccatgggacccccgaacgggcaacgaaccttgggaccccagggacacggacacccgggcgcctgggctccgattacgtcaggtttgcactgtttgcttcaacgacttccctgactcgatccgtccttgcaatccaccgaggtcatttagacatttattaaattcatgcatttcatattgctgtattgactccgtatttatggcgtctcccgcgcagaagcgcgtcaacgtcgtggtatccaggctcattccgcctgtgttactcggcgctgtcatatacgcttcttatgcggtcacgaaaccgttatccagtgagttttttgcgaattcggtcgcttttttaccaggaaactaacaatatgaaccccagtcgactatctaatccatcccttaccctcctataaccgaggcccacgagtcggcgctggcgccgcgatcatcgcgatctattacgtccttttaattcccatggtcgtttcttatatgcgactctattatcaagtcctgtggaatcccggataccttcccctcggtgaacaaaaattggccgatgacgaaagcataaagcaatcgaagcgccgtgggaagaaaggcacacgcaaagccgatccggagaagacaaaccaggcagacatggatgtggaaaggggctcaaactccactgctgtaggcaccgccgtgcagtcagatattgggttggagagcttctacactaaagatgtcttcgtctgccaggaggatggccggcccctatggtgcactacgtgctgtcagtacaagacagaccgggcgcaccactgccgcgaattaggtcgctgtgtgcgcaaaatggatcacttttgtccttggtatgatactccctgtgcacataccgcaaatcagtatccagctgacagaatgcagggttggaggtgtggtgtcggagacatccctcaaattcttcattcaattcgttgcttatactagcatattttgtacctttgttcttattgtgtccgcttattttacagcggagatccgacgccaggtaagacttccacgagccatatcaattctccgcttgttactgactttcgaccagaccggaggagcaaaccctcattggtgtgtctgtattggactgtaagtgcccacccacttgatactaggaattgagcaagtctgataaaaaccaggagcggccttttcgccttcttcaccgccggtatgacattgagctcagttcaaatgggcgtcgccaacatcacaacaatcgaaaacctgaatcggggcagcgtcgtctggaccctcgccatccgtgtcccagaatacctcctcgaacgactctgggcagccgagtccccctgggctccgacattccgcatggtctcctacccactacaaacatcatcgtctccaacccagctgcaaaccacaatcccctctccggacgaagacgtggttccgggcgaacgccacgtcttcgccatcctccatactttgccgggccagaatcccttcgacctaggcagttcattgaaaaatctccagcagatcatgggatacaatatcgtcgattggctgctgccgatcaagcagagtccgtgtgctgaccatagtagcatggagagttattttgccctgggtcccgtggtgacccgcttgcggcttgaggctggactaaccccgcccgaaaccggggctgttccgcaatccccacacccaggacgtaaccaccggcaacaatctcctagtgatcaatagttcggggcgcttagggtgcttcgtgcgtgttttggatactttataattaatgcaatgtatctccattaatgatgcactattggccggcctggctgtgttaggatgatttatattccgatagggtgatgccccctgccgggcaactgtatggctaaatgtcgtcgctatcacgtacaggcctcccaaggtcatagacatcttgatattagaaaggtgagccatgagatggcagacaaaccaaggttttccgcgaaaataacacgtttggagcgtttaactcggtgatctttactcaatataagtaaacaaatcctgacttataactattcataatcgatcatttagcgatcactaatattggaatgagagaacatatgaagtctgcatgtatgatatggcagctttatgtgtggtaaatgggatatatatatttggttattccagggtatcctccgattccagacaaataactaagtctctatatcctgcatcactcattagtattcgtatgtcccgtttggacagacagattgttgacatcagcgacacaatgttcaaacattatccaggatcagcacgagacaatcgtttacagtatatcgcctaacaccctaatatgccacaatgtcccgcgacaataaacaaacagaaacagaaaacataaaatgaaaaggcaagaaacgcacaaaaagagaggaagaaagagacgaaataaacgcaaacacaaccctaaaaccgcaaatctctatctcccacataatctatctccctagggaacaacctctgtgccacagaagtcgcattcaacatgggagcaaataggacatttcctctctggcgccaggttgggattgactaaattctggcacttgcagcacgtccaccattccggcaccagtctttgggcgcttgtcgacaggcattcgggtgtgggagtaagaacggatatggcatccgggaacggagccagagttgagtgtgcgtgagatgtcagcgtactgctcatggaatcggcataagaggaattgttaggccgggtgaagtgccatccgtgcgaaaaaggagttgaattctgtccttcactgttggtcccggtattcgaggatttgttggacatagcgttggacatggcgtgggcagatatagtggctttagtgtggaatagaagaattgattggcaaaggagatagtttgatctatgggggtttgatttgcgaggttctgaagcttttgaacgagttgattgaataagttgattgaaggagtgaaactgtagatttaggtatatcaagccaattgagtctgattgtatgagaagcagccatggaagactcactcttataatgcaaatggcacacacagacaccatgatcagggctctcattacagcacccaaggcccaggtatagaagctcacgcgaaacccgaggtgaacagaccagagtcaaacagccaaagagccacaactacagagtcgaaaccccagcatagggaacagaatacccagcgggcaaagaggcacagcaaacagcagccggcagtgtttaagcagcagtgaagcgaaagcgggaccagccagagcgagagaaacagcatggctccacgcccatatatttgatgtggaaggataacacgcttacaacctcatcatgacccgaacctctctagactacagtgtgtacctagtcataagttacatagtagttggctaactaagttagtcagtaaacatatgactaaaccatgtagatctctggtattcccggatcccgacgcaaaatatcacgccccggtgcccgggttgtgggttgctaggcgcaatgctggctgggcactacccgggtcgcgggtggatatgtagatatagggcttctattactcgatggccgggtggagtctatactataaaagctgggttattagaccttgaatggtagtacatagcccaaattggatcgtgtgggtttcttatgcggagtctgcgcctcggttggggcttctggttctcgttcctgcggtgtacgagggtgaatcggaatgggggattcgccctgctcagtgggctcggttcgcctgttcgcccttttcaatagcccttattcgttgctttgattattgtggatgacatatcccaaatatgtgcctttgtcaagatagtgcaatggatgtcatgtccagacaaagccctggatgtttaagcaagtcaaggccattttcgagttgcctaaaccgatcgatattagggtggttccatctatgacctcattcccatggagccaattcggccaattcggccaattgcacagcctctatactgtagattaattaagttgggagcaaatgttaggtataaaaaaagcataatccaggggatttatatccacgtttccccctcgagatttcaaaatacataactcacaactttccctttgcggctcaagtgagatcacaaagcacctgtggaccccatttctaaaacccacacatgtctcagattttgcccgaaacagaaatgaaagagagcattctttccgcctgtcggggttgtgttttgcatatgaagcaagggagtttcatagttaaagagcgggaacaacacatggcatccatggcatccatggttgacagcttcgagttcccaaggttcacgcctctagatccatggaatcagatttatatacatattcttatattattcttattttacatttgccttctctttcatctccagagtccacctgggcaacttccttcctcgcccactcagcccgggaaagccttggcgttattagtattactaaccttttgttcaacctgtggatccccaacccacttttgcgtcattgttcacacctttcgctttaacacacttctgaatcccctctttgattgttcagttgggcaactattgggctccaagcttcgtgtcaagttcggccccgactttctcgactttgtatcgaatcttcgcctccgagccaaccagttgggcatttctacatagcccgactcagattgtttaattactcagaatctcccgaagccgaccagagaacagaccgtcacacctgatttcaaccggccaagcattatcatctgcacccattgaatctacagttgcatatcgaaatgtcgagtcgctaccggaatctatctcccagccgagaccgacactccctgattgaacccatgagagcgtcaaccggaatggtagaactaaactccttctacgacccttatgatgcacccaggcgctccgactacgactacccgtccgatactggatactccagtgctttggggtaccggtcagggcgaccatcgaaactcgaagcttaccaaatatcctcccatcgagttcttgacccgagtgcgtccaccaaaaaacgtaccgaatacagcatccaaccccgcaataggcacagaagcaatacagcaacgacagcggactaccatacaccagttcgtctggccgtaccttccgcatctgttcaacatatctcgccggtgcgccactcaattcagcgccgtagcccgagtcctctggctacagattccggccatcacatagtctcggcttcccctcggaaccccgcacatcgccggatctatagcaccgactatgcgagcgacacgggctatatggatctacggaatgatcccagacctaggactgatcatagtggtcatcaacaccgtgtccatccgcctcgtgcagtacgccagccagcgtacgatgggctaaggaaaggtgatgacatcgatgactttgatgcctattcatacaccaacgctcgtgagcaattcgaccgggactacccggtcaagccccgtcatcgcgggccgagatactcgcccgatcggccgctcagttacactggcgtggaagaaagccctcaggggaaatcgcggaaagaccgtcaccgtggcccacccccgacatcctggggccttgacaagctcgggcgtgaacggccgcgaagctcaacacacggcaaggataatcgggacccgcacagatcgaaggatggatttcatgatcaagccctggtcgccgtacctcaagactctgatagcgaatacccttctcgtcacgaggagcggcgccgtcgtgtccacagagcacgccacgtgaacgatcgggagcaccactatccagaagaccaccatctcaagccacatgatgtcggcacggtcgctaatgtaggacttgggacagcggccttaggaggcgcatactccgacttgtcggactacgaaccgcatcgttcgtcgcggcggaagcacagacgctcgcacggtggccatgatgccgtccagcccccatcgcgggagctggtagcagcagttccagccgatgaaagaaccaagcaagcctacctggaccctgccgatgcccatcgccacggtcgatcgcggcgatcctccagccggcgggcgcacagcaatgacgccgggacatcggacgaagacctgcaaaactacaggcgtgagcccgcacgtcgcacgcacagcagcaccgacactgaaagcgaccgggaccgctcgcgccatagagaccgagaccactcccgcgggcaccgctctcgctcccgccgcacgttggagaatggcaacgagcacatggccaaagatgaccccagaagacttattgctgttgatccacctgctccaaaggagccagagggtcctcccaaaggaattctcaagcctccgcgcccggcattcccagaggaacccaatccggtgagggagggggtcgctcccctcaaagatgctcacaagcaggggatcccgccaggagctcgctggacgaagatcgaccgacggctcgtgaatcccgaggcattacaaatgggcaatgagcggttcgaggagcggtcggattatgtgattgtgttgagggttttgagcaaggaggagatccagctgtatgctgtgaagacacaggagatcagaggtaagttacgctgctgtgtatatcctgaaatcacatttgaagtagaatactcaccattattgcatagatacccgacacaaggaacagctgcgcgagagacgcaagtccagagatgagcatcaacgccacggccgccgaggcgacgagtcctccagcgacgacgaggacgagggcgaggaagagccctggaagcagctcgaagcagcccctgcaccatccgcacagaatatgtccttgccgtcgcgcccacgcgcgtcgaccaactcaatgcaggaggctgaaaggcctcgggtgaacaattcgtctgctgcaccggcataggaaaatctttcgatagctcgggatttgcatatccttcgcaaggcctgggactagaacctagtccgttgagaccaaaatggcgttcgcgaagtgtacaggggcgaggaattcgtttgttttcatgttggctttaacaaatgcacctatccttctgggacgaagaccatgcgacaagcccctgcaggcaaaagcaagtacccgtccaatttacgcgccacccactgtactccgtacaaacgcatctcagactcgagtcgtctctttcctcttccaggttatttcaacttacaccgcctccacaaccatcaatgactgcattgtatgcactccgtacgcacctgtcatattggttgacaggacgcccaagatcaacaacgcctgcgtatgcagcccaacacgccgctgggttctctccgatccaatcaggcccccatcttccattccggaacccaacgatgatcaatcgctaggcaccgacgcccgcatctatagtcatctattggactgaatacaacgaacaatagtctggcgtcgagtcgtgcggctcggacggatcgccgtgtccttcccttttctttcgtcttctgtgtcactcacatattcctggatcagtccatacagtggggtctgcagatgtagtcatatcattacattatctcgaggaagagaagataactagtatagttgaagctaggcttctctacttctgaatatttacttctttcgttggttggtatgtgcagagagcacaagagcgctaaggaaatacaagccaagcgccctttctcaaagcgcaggagggggaaatgtcaagcaaaaagcaaataagagccacacctgcgaatgcaattgtgtgaagatgcaatgttttctttttttccttttttttctttttttctttctctttcattttctacatttgaagtagtgtctgtctaccattccaccagggatcatccaacagcgtctaaatccaaacccttcctattgcatgtctgatcgtcgaaaaagaaaacaaactactagtcccagtgaggaaacagacagaaaagcagaagtaaaatggggaggcatttactccctagattatcgtagttgcataggggctgcaggttctaggcatacgccactagcaaagatttaggctcttgtcggatttcaccgacgctcttctggtgatagcggggatatcgattggttattaacattataatgaagcataaaatcgcacatctaactacagacttcttaacgggttcatactgtgcgggagtatccggagtaaagcaaatacttccaagttcatactgtaccttgtacatatttagtcaagattatatgttgtaaacaatattaaatgaattacccctcccatgtttgttcgaggtcgtcccacctacttccccttgctgtagttgcaatttgcccagtgaatagtaatagaacagtaagagcagaatatagggatggacgtatggagtactccgtactaagggttacaatccttagtactacaggtatgtacgcattgcatcctagcatcgatgactgtattagtgttggttaagtactcatagccttttcattccgtatagcgtacacgagcgcctgcccaaacggttatagcaaagttaatggatattggatcacgtcggagacattctcatcacatcggtgtcaaagtcgccgagattatgggtggtatacaaagtatatgtctgtagtatgcgtcatttagtatgcctcatgtaaacaacaactaaaggccaaggctaaagctaagaagcattgtacatagtatgtcgtatagcgtcattgctatgctgcatactggagtatacgattcacggtatacgatgtagtttccattgccgtgcaagcggtctgtggatgtaaaatcacatccgattcgaggaaccgagatctatcgaggtaaccaaccgcccgagcgttgactgaatggacgagccatctagcgcgagtcatgggtgtggcgaggggtgggggaaacgggatctcacttggatgaagcgaactctgggtaatagcgtatgatatatgatagctaagctaccgagtcttggtcgatctcgatatgaatcaaatcaaggaagatggagagctggtttggctcagagcttgactggcgggaaggatcttgttattacaatcaattgctttattgtccatatacagtgcttacctccgtcttgaagatgaaacctaaaggaacttgctgatccctaacacgatctcctaacgtcacgacgcgatttttaatttctaatcctatccttgtttttttttttttcgattactccgcaactccgtattccatatggagtatctccggactgagtatgatatcagtccaatcgttaactaactagttactttagtagaaattttttatattgcattgacgccttcgtcttcaacatagtacaaaaatcaagattggctgactaggtgtaagtgcaaccatcccgaactcgtccaagatcgtcgtggcacatgggggcaaaaaagtaaaaagcaaatataaacgcgctcacttgacccccctacctccgcctccgcctctcgacatcttgacacatctgaccttgacccccgattgtgtcattggattatcaatgcggccggggagaaggactgaattagttgcgatctactctggacccccggcagtgatccagtgcttatcaccaacggagtatacctgggcttattataggaggaaaagaacaaattcgttttcgggttactatcattgcctggggctctgacgttagatacgtgggatatctacgatcagcgattgaatgttgcattgcgtagacagttctgttcattcggtgtgatttccaggcataggaccggtgtgtgtatgtatggtaattatcatcgccatctctgcacagcctccgggatttccgtgtcttttcactgatagtaaaaaatttcaatttttggcattttcccacgcactcccagcctcaagatagcacagggagagatctgaaacaattcgctccggccacgcgacgggttaccgcgcccacatgcaggtttaacacatccctccacatgggatggctcacaaagatttagtttgcggtgagaactaacttttgggtattttggcttttgcttatggttcggctagaaactgtttcgaaagatatatgtgagagacggactgaaactgatatattaactatgaccacatattgcagtcggaaccggaattgtgaaatacggaatatggatgtatttaccacctttgcccgttgcatttccattggacgcaaatgatacaatcgctacaccaaatccgatcagggcccccgggttacgattccccgattgcccccagcggcttttggcggctggggccggagaacggagtaggccggtgtgataaccttcaacttatgccggacttgcctacacaaaagtcagagacgcgagacagctcggctaaaaataataataaatacctcatcccacgttctaagctctattcttcggatccggatggtggggccgttaaacgatccatcgactactgaggtagtatgtatgtcgcgtctacggtggatgcttgagataatagtgcgaagtacggagtacaggtacacaatatacaataatctacagtgggaacgaggtcgtagagagccaatgcaacatattcgagttgtgcattcttttggacttttggagggggggttatcatttcctcttctcggcgctcatcccgcttggtccgaagggggggccatatccgtcttagggcgatccgatccggagtgcggagaatgttttattctttttattcttttatttttattctcattgactataaggaaggaaaggaaaaaagatataagcattaattataggctgattcttcaagggtataaagacgttacaagccctggggcagatcattgcagattaagcagactaagcagggtggtcaatatgcgcatagatggaagaccggggtgtgccaactttaatttggcagttgaatcccggtcgaaaaaggagaaagcctttagcctgggcacctcggcatctggacatcgatggatccacgcagccaaacgtaaccatgggcgcccgccaagcggctaagactatcaagacttgaagctgactccctggctcgccgctccgtccagctcaacccgcgatctactagattgtggcttgtcgcccctcaattgccccatgtctattggtgtacccatgtttccatttccatgctcggccgagcgttgatattgagtaaccggacataccggtatcgaaatcttcccggtttccgatcaggacgtatctccccggaattcggaatggctggttcatacaggaaaatttcaaatttgagctagctggaggtaggtctggaggtgaagggagacagctcgtctgcattgctgtagctgcaagaagcaagggttacacctggccaacgtggacgtccggagtctgcttcttcaaacttggttttgcatgatcattctatcattcttgtcgatcaaaagaatcgagcaattaagtaaaagatcacggatgactcgtgccgtatttctatctccgggtttctagcccggcggatgaataaaaccttcgtacagaggaaatacctgctctatctatttccagcaggcccatgggtgtcggcgctagatggcgcgtttgaactatgatatgcacatactatccacagacagcagtagctcgagtcagtgtgctgcttagttcaagccccttgatgacaaagtgcctgcaaaccccgggcccagtttcctcttgctggatcgggtttagggcgtaggtctcccgcataagagatgacaatctcacatacaaacggtgttactctctcgccttcgcacaggccacctggggtctttgctttgtctatccgaacatgacgtactctcccatggatcggcaagcgatcgagaccgacggagaccggcgagaaacgaaattgaatccacactttagcgaggttcctacccgtctcgacaaatagggagcttcgccatttaaaagagctaacaatgctctggaccactcccagtcgatagtcgatccggggcggtagtggcacagtttagagcaaaaaggggccaggattgtcggttgatccgcccaggggtttgccctgtggttcgtccccgatagcgtccccggtcagccccagccacttggcgagtgacaccgtgtgtaacaggtagtgtcaggtggctggttaagctcgtctcatgtttggtttgaattgagatattgaggaataggagaaataaaaataaaagtagtagatctaaacagtacctcatgccatatccaagcctgcatagaccatgtgggtcagcacaatttccttgaagcttggagactccaaaattaccgtgtgggactgcgggtacggcttaacggaagaccgcgggatcatcgatcacagcccacgccaatagcaggccgctggtggaaatgggcaccgtttcttagccctaaaaaatgagaaaagaaaggggcgcaaccgtgcacaggattttagctccaaccttcagggctgagtccttgagttcctgagagattaggtgtgtctcgaacactcaatccccatacttcgatccattgagcaggatgctattggttctaaccctggtttttccgtgtctttattgtatagctgaatggaccacctacgggctatcccgattctggtagcactctcaaaggagtatagacaggtttgaattttcttttcttgccttttcttttggatttttattattgtgcattgcccagtaaacctccgaggttggatttctgtacgcccatcatttcaccttcatgcaaagtcactgcgcaacaatcgacacgatgctttcccctttctgttgatcaaatcaacgcacattgtagacttgcatacggagtactccgtactccgaaggtgagagcctcatgggccagttacccgccccttggtcatgggagaacacaaatgaaaagacaaactcaaatcctcgatatcaaacttaacatccattgttaccatggacggttaccgttattaactccgaggacgcccaataacctccgagaatcgtccttgagcactcgtgccgggaggtctccacccccgaggtattccgtacaaagaagggtacaaatgacaagggtagcagagtataaaaaataattaaacctaagagccaccttatagaaaacgggtgcctaggcattaatttagcgtttcggccatttcacatgaagcacaggggccaaaaaccaaaatgcttgaaaggatttgtatgttgtagtgacatgcatcggccggtgtcagagaccggagaaaattgggagaaggttaaggcttgcatctatcttttctttctttttttttcttttctccctctctgcgcttttgatttaatctttttcttgaaccacagctgattaaaaattgccaaggttgactaagatgccactagagaagtttcgggatagagcgaacccgggtgctggcccgcattgtgaatctcaactcgattggctattattacgacggaacgatggctcttctagcgttagcgtccaaaagagggactcgatcgtgcgtcgttctgggatgggtatatcagagggaggtttttttttataaatctctgtcaagcagcgtggccgactccgttcggagaactagttcgtgagatcgacagggttacactcccacgaactcagcccagagagagagaaaatactaaatgggcgccgttaggctgtttcgagtttatttggatggagagctgagttttctctttagacaattgggccgtggaaagaagcagctgagaggtcggtgtaacttactagtacgcgtctttaaaagaaggaaattgatttcctttttttattcattcatttactcttttcacgtattattccgccgatcttcgatatactccgacgagaatttctcagcccaagccgtacctgaaactggcctctgcacgatccgagagcaacgtcaactagctttcttttttagcctcgagtccatcctgaggtccacacttcaatctgcatgggtcaagtacatattctagactttgtggtgggtcgatgatattcgatttaacgtcagggcaaacggatgggtaacttgtatgttgaagtacttgtacaatgtgtacaacgtcgacagtcaaattggccttgtatatacggaataagttatagtagagaggaaggaaaaagctctcttccttctattattctagaggctacggagtatagagagtctataggatatctccctgacaatcaccatccacctgaatctcaggcctcaagagtgatcttatttacactttgcaacatataaaatcaattacataccccaatggacgtatcacgatcgctccatcggatccgagcagtccaagccgttgcaaatcccctggccctaactctgtatagattcactccccactggaaagcatgccgtagcacatcctttccccacttgcacgtctctttgtctgcacatcatccccaagcgtctatctctcgatttctctctttgatctcggctagcctgatgacacatttaatttccaagaggctcggatgtttaccggactcgaggcaacctcctgcatccatcctggtcattattacacctttcccgctagttaccagatcctgatacgctttgctcttggacgtcttcctttttttttctaaattggttttccttattgggcttttattctttttttgcatttctccattttcctctttctttccttttttttccttttttctttctttcttcgtttctttttctctctttttcccaaggcccttttattcgagctcgaggtttgtcttcgaaaggagtaagatgagaatggagatgggtgcagctagataaacgaccctggaccctccacttgccttcacattgacacggtcccctgaaccccagtcacctagtgtgtcgcgcagctttctgtttagcctcagttcgggatcgcccgcgtggttcttacatttttaatttttcttttccactttctcccaaaaggcaccccatcccagttctttcttctccatcttgtactcttttccaagtttgcaagattctgtcctgggccgtgagagaggtcgttcatgaccggcatggtacagcccgaccttggtcctccagcgacgaagtacaaggaagattcgattgatgatcccgtgagtatcatttctattggtatctttttcctttccagttcccgtctaccctatagatttttttgtgagatctttcctacttcaatatcattcctatctttcttggtcatttatatgtggttgccagctctatgtccagtggggttatctcttctctcgactatctctcttccgtcaacctggatcttgtgggagcaccatggtcaataccccaaccagacagccttcaactcaggatgccaaaactgatcgatttggggcctgttggccatgacctaaggagtttgtcccgtttatatctcttctggacccacgaaagccctgctctgactagagcctcactacgaagaaaatgtttcaattgagaggagcaacggaaaacaatgcccaaagtccgtgtatctgcatgatccagcttcgagtgctgtgtcccccggaagaaaaaagaaaaagaaactcccactcgtgatatcaaggacacaccaacgctacacagatccatgctattctttagttctggacggactatcccggctataccctggcgcaattgttacgcacctaaggctagccctgttcgaggatttccattgatctggggcccaacccaaccccccacctctatgatgagattctgcatacctgcaagattcaaattcccacgctagaccggaggggtcatatgctgatgtcactctggatacgtctggtcgtgtttacaagtttcctttctttctttcctacgtccatgttctcagcttgtagcaccgtgcattttttggctcgaatcttgcttgtcgtatctttctggcatcctttcggggctggctatcaaagttccagtcactgatgtgtatttctgctacagcttcgacacggcaactctgggcgttcgggttctcaacagcctcaatctcgatcaaatctagctcaaccacagaagcaaggccctgcctcgcctgttcagccctctcgctctcttccgcctaccacatatcctcccccaccccatcaattaggaaacgaagttctccatcataatcactacggaccgcctcctcaagagtcgccctactacaccacccattcttcctatacatcgaccccggcgtcggcacattacccttctagtggtaagccagttctttttagcagtgggaaatcgttgcgttgagaagtgacgcacctgtgcttggctttctgacgcccttggcccatttaattcttattaaagacatcaactaatctttaggattagggccacctgacctcatggcctctaccgctcaaatgcagagaccttatccctctatctaccacacccctcaatcaagctcaccagcctcggtagcttctcagtcacatgaacaacatggccgcaacatgtactcgtcaccccagatgccgccacagatgtttggctatcctccatactcgcccatgaacccagttcagcccccatacggggcccaccattctccccaacagcatcctacaacacagccattgatgatgcctcctcagaaagctccatcccaagggccaccacaccaatccccccacctccctacgtccggcatgtccagcagccccatcatgaaactcgatacctcccaccccagttcttcaaagcaatcgatgctgaaccctccccacacggcaaccagcagccaccacatgtctgctagtaatccccacgcaaccccatcactaggcggcagcacctccagcgcagcaccaggccccatcccagccactaccccactggtcgtgcgacaagacagcaacggcgtgcagtggatcgcctttgaatattcccgagaccgggtgaaaacggaatacaccatccgctgtgacgtggaatccgtcatcgtggacacgctcacgcaagaattcaaaaccgagaactgcgtgtacccgcgggcctgctgcagtaaagaccagtatcgcgggaaccgactggtctacgagacagaatgcaacgctgtcggctgggcgttggccgagttgaatcccgcgctgaggggaaagcgtggattgatccagcgtgctgtcgatagctggcgcaacagcaatcaggacccgagactgcgcagcagacgggttcgccgtatggctaagattaatcgaagacagtcggttcccgcccagtctcatatgccgcagcaaggcccggttggtccatctggtccgcctggtccgggcatgaatgctatgccggctcctgttccccgtccgaatttgggtcctatgtcgatgggcccgccgcagatgcatcatcatcatcaacctgatggtaatcctaatgaggaagttagcggtatgtttcaccacatgtgatgtactttgtgctttcggtgttttcctttcttttttaattttcaatagcggcggctcactcccgtattctcttctggggctttttttggaccgggtctatgtgtgtatgtgtatatggggagttttgtgtcttgtcaggtcccatctgtgtgtgtgaggattgtcaacggttgtatgagatgtgtactctctcttgtatccctgcctggtccgcctgtgttcttatatgttctattccataccctgttcaacttcactactttgtcaccttttatcatttgacaccgcgcttcttgtgctttggctcttcttttcttggaactgaacctcttccccgacatggttgtacagcgtaggctaattatcccaacacccataggcacagaatacccaggccaccgaagcatggacacacgcctcccacagccctcaattcccgacctccgccccgtccacatcttccacgacaccccaacaaccctaaccccaagcggcagctccagtggcccctctatgccccctctactgcgcgacaacaacctcacctcactaagccgccacaccatcgccaccgctgcccgcatcggctcaaccaaccacgacatcgacgagcaaggcccaaccaacgaagatctcttcagccacctcccagacggcaaacgccgcaaattcatcctagtcgatgacccgcagcgcggctgccgcgtccgcgtcaaggtcgtcctggacaaagtcaacatggacgagatcccagactcctaccgcgagtccaacgccgtctatccgcgcacctacttcccgatccagatgcgcgacgagaaccgtgtgatccccgccaagcgattctttcgcgatgacgccgagcaggcggatgaccccgaatcatcgactgtgggtcgcacgaccgtgcccgcgccgtcgctcgacgccgacgctgaaattgacgtgccgaagatctcccgcagaaaacaccacaaggagttgatgcttaatgacctcggctaccgtatgagctggagtcagagccgtgtgtttgcgggacggatcttattcttgcagcgatcgtgtgagtgtctacgtctatttgttttttttttttttttctagttttcgtcttttaattcccactgggggatttctattttcgacatccacacgtgcttgtgatcaatccatggatttgatctgacgacgactgagacatgtgagacatatgagacaccgctaaccgtttgcgaatagtggatgcctaccgtgataaaatgcgaagtagtatgatcgctgcgggccaggacgccacggatatcccggatcatttcgatactcgtcggggcaagcgacggttcctggagcgtgggtgtcgggagtcggagaattctgcacagcggagtgcggaggaggttgaagggtgacgagatgatttctaatattttcatttttcttctttttttattagttctgtgttttttctgcctttttttggtttgtttatatcgtttccggccgaggtatgcgacaagggcgttgacggtttgcggaaaaacagccaaattccaaaaacaggcaaaagggagatatgattgatatgatctggatatgcctcagatgataccacgactttgattcacgttgaatgagacatgtgtgtttatatagagaaatgagttgacagttgacagtgttgacactgacgttggccgaagataaaaatagcaacgcaagggactcacatccactgtaatccacatgggaccctggaagaccctggaaaagaaccctgcgatgatggaatgtatactctgtaaccacgttcacgtcaacggggagaatagaaagacgaatcatagcaatataataaaataagtattccatagccctggaattctcattcagcgtggtaaatcgaagctttccccgttgtcccggccaacgcctttatttatcccgacctttgtactctcgacttcgtctcttctctctacatttcttgtttattgtctttttggagagattcgaaatcccttggtgtgaattcggcggaattcagctgcattcagtctaaatttctgccttggcaccttccctgcatttttctccgttcgcgggattccttcaccctcagttctttattattcaaagtccggtccacccggacacttctccttccaaatgtcagactcagacaccccactacctccaacccatcgttataaccacgcctctcgtgagaaccaaaccatcacacccggcatggacaatctcggtcccagctcgccgggcggtggcatcagcggcatcgccctaggaatcgccaatacacacagtcgccaaagcggcatcgacgcatctcgcggcatagacgacggcttcactggccccgccgagcgcgagtatcacacaaccggctcagacacaccctacgtgccctcaccttatgccggcccggactcgtttcctgccgaacaccacgcattaaatatggcgagaggcggcgcgctggcctcgcccgctttgcagacgcccagtcagtcgtcggtgcagctgagcgatcccgcacacagcccgtacccataccccccgacttattcgggcatcactgatgggccctatcagcgacattcaaccgcgtacagcaatggtgagatgacgaatattaaccccgatgagatcgtcgatgatggcgatgaggactttgggcccccgcggagtcgagctgcgcctgctgctgcgggtgccgctggtggcgccgcgactggtggcattctgactggattgtttgggcgagagaagaatgttgatgttgcgtatgactcggttcctggtggtggggtggagagcggaggagcctcggggagatcacagagtaacggaatagacgggcgcaagaagatgggctggattgttggtcttgttcttgggtttgtgattctgggtgccatcatcggtggtgcggtgggcggtacaattggcagccatcatcacgcgaaccagtcgaaggttgctgccggtagttcagacactgctaccggtgatgtgaagaccaatggggaccttggcaaggattccgctgagatcaaggccttgatgaacaacaccaatctccacaaggtcttccctggaatggactacacaccgtggggcgtgcagtatccggactgtttgaaatggcctccgtcgcagaataatatcacccgtgacatggctgtcctgtcgcagttgactaatacagtgcgtctttacggtacggactgcaatcagactgaaatggttcttcatgccattgatcgcctcgagctgaaggatatcaaactttggctcggcgtctggattgactcgaacaccaccacgactcaacgccagatcacgcacctctacaagctcttggacgacaccaaagacacatccatctataagggtatcattgtcggcaacgaagccctcttccgtgccggctctagcaagcagtctgccgagacgaccttgatctcgtatatcagaaacgtcacaaaggaggtcaagaagcgcaacctggatctattgattgccacctccgaccttggtgataactggaatgctgagttagtggaggaggtggatgtcgtcatgtccaacgtccatcccttcttcgccggtgtcaacgtcgatgttgctgctgcgtggacatgggatttctggcagacccacgatgtggacttgaccaagggcacgaacaaaacgcaggtcatttcagaggtcggatggcccagtggcggcggcaaagactgcggtgatagctcggtctgcgacgacgacacgcctggttctgtcgccagcatcgagaacatgaacactttcatggccgactggatctgcccggcgctggaaaacggaactgattatttctggtatgtcttgctcactgtccattggtctattcaaattactaacactctacaggttcgaggcattcgacgaaccatggaaaatccagttcaacacgcccgggaaggaatgggaggataaatggggtctgatggactcggcacgcaagctcaagacaggtatcaagatcccagactgcgatggcaagacggcctcgtaacgtgctgtccgatccagccctggctctcttatggaatcatgatcacgaaatgttctcttatctgcataagtattgtgttcttagtctgaattgttttctgctcactggcgtttgtctttctctgataccattcatcacaagggaaccctcgaacatctcacctctcatcctcacacctttcctcgattttcaccttttccacttcgaatcaaaatctcggggttcccttcctggcggtccatcatccttccttcctgtctttttttcatctgcagtctttaccaattgctactcttcttcgagccatgcttgattctaccttgcatatcttctttggtgctgtccattcctttcattcccatttatgaggatggtcttcgacccatgttttcggtggaaatttgtcttcatgggatattcacaggggtcatttgcgcttgtgtttgcccgcctagctccatgtatatcatataccagctcccctcggcctccgtgtacatattaggtcaattcatcaatctcggtttacctggaattacctgtaaaaaatatcatatccacttgctttcttcattgatcattctcttcttttcctgcaaggaagccctcaggtattattgtacagaatataggaataagacaatagaagtggaacataaggtctataaatgaacaaagagggcagactgactattcagaataactaggatagaaagtgcctacctattggctagcacttctgcaaatgctgcgaacaacaaacccctcacttagctagcaaacaatttggtaaataagagaaagaataaacaaaagaacaaagaaagaaacatatatgtgctgaggatctgtagagtcaatgcagagcgtaacaaacaagacaataatagaagtagattcataagtaggaaggaacctcgagaaagaaaaagtcctcagaaagatcttcagataacagagagctatctcggtttaaaggttccaaaaattagaacggagatgagaacagaaatccttttgttaagctcctgacggacaatagagaactcggaaaagtacggtctgtatccgcagagatcagacggagggtttccgccgtaacatgcttcgtgcccttagaccaggaccgaagccccagcctcgtttcagccttagatgagccgcggcaaagttcctatcagagtcttcaggatttcccttcactggacaacagcagacgtatatttccgaatctgaagctgaagaaagttcaaaaaattgaaagggtactcaacaggaacacgatgtgcaatgtggactggagtggtgtggagaagaaagcaagaagaaaagagaggggggggggggtttatacctccccgggggcttgaggaaatttgggaattggggttggtgacgatttttgaccgaaagggaaggcacctgatcaggacggtacgtggaacgtgggtacttcgactagtgggaaggtgcaaacgggtaggaagatcatgatatttaactccagaaatacaccaacgccaatccaatgcataccaattctataacctcatgcatctttcatgaaccaaaatgcccaaaacactaatacacatatcattctgcaccaacgacctcctcgacccaatagagcctcgtattccaaaacgcatgctcaagtgcttcaaacaccggcaaacaatacgactcagccccatccacatagccttgtagtacaccaccagagtccgcatgctcgagcgggccaccgaacaacaaccacggcttcgacggcagcagcaattcaagatgtttgcgttctgcgccgggacagaagagcagtgtgtttgctgtgatatgcgagaaggcctctgggtgtttgatgacatttatgttcagggctgcgaggagggattcgtctaatgtgttgaagacagggtcttgtgcgtagacttttatatccgaggaggtggtgcctgtgctgtggttagcgtgggatactgtaaacgtaaatggagacagtcaaagcaaagaagaagaccagaagtggaccatccaaaggatcgggaaacggacaagcaacttgatccttaatactcgccagggcagcaagttgataaagcgacacggagcgccgatcaacccatccatcacgcaagaacccactcgggctcccaagcccaatacagacaacggcgtcaacagggcaacgggctgggatggaagaaggagcagtatcagcatcagatgaagaagaggctttttctcccgccctcctcagccgttcatccaaaacgcccgtcaacttagtccaactctccgaaccctcccagcgctcacgatgagttcgaaactgcgcctgcagctcatttagcgtgagtcgacccggtgcctctgcgggagtcaggacgggttcttcaggctggtcagaggagatcccagtcccggattctttgactgctgttgtgcctcgcgggcgtgtgcgcattacgcgccgcacgtttccgccgctcgcgacatgggtccagccgtcgtcgtcggtcacttgggttcgtttttgggttgggcgtttcggtcgggaagggtgggatgtatggggcatatttttatataagtatacttatataaataatgtggattttggacgaattgggatattgtatagggttggatttattgaagcttttttttggagatgcgggggaaatgcttggcaggactccaacaggcttagtaagtagactggccccgagaagttactccgtactgagggtgagatagaactacatattcgggtgaaatagtgaaatgctttgcaggaaaaagtccaacaatccagaacttaacctatgggcgcactcagccactctgtaagcgctcaagttgtttccccgaacgttagcgtccccctcggcgcttccaccgctggtcgctcagcaaatcatcatgcagtattcaccctttgagtgatggcacttgcagcggattgtgatgatcccaggctacccctgctcttcgtcactcctcgagccagtcatagatgcctcgccatgcagtctcggtcacatctgccttccagggttttgactcgtccgcccagtgaaggccagtcagtacccctcaaaaagaccacttagccctcgaaaatcatgttttggtcttggtcttggagtttctatgattttggtgtccatttactattaccgttgccctccctattatctgcttttattctgcgatcggagaaatcgagtctgagtctcggcgacagctgaataattcctcaactcgtgcaacttgtcaccgtcgctgtatctcaccatgaatttcacacaatccatctcgcgatgggcttccgtcctactcctgctgtgcttgggtctggcgcacgcccataccgtcattacttaccctggctatcgcggaaacaatctccacaccaacggcaccatcgagcaagctaacggtcttggtgttgcctacgatgcgaagaatggctcatacatctacccatacggcatggagtggatttatccatgtaagcaagacctatctacccgtctagatatcaatcactgactcgtttttcaaggcggtggtatgcccaggtcgaccaaccgaactaagtggcccgtcagcggcggtgctgtcgccttccagccgggctggttcccaggccatgccactgccctgatctacgtcaatctcggcttcggcgaaatcccggaaaatatgagccaccccgtcgtcccgcccttcctcatcgtcggcccgaccaacaatccttaccccgggactgtgtgtctgccacaggtgcctctgccggccaatatcaccgtcagcccgggtgactacgccacaatccagctggttgagacggccaagcacggcgcttctctattcaatgtatgttccagtcccctcgttccgacccggcaatcaatatactgactttctagtgcgtggacattgagttcgcagaagatggcgatgcgtctgtggagacggtcactcgcgacaattgcttcaattcgtccgatatcagcttcgagtacatgtacaccaccagttccattggttcgggtgcggcgatgctacatccgaaactgtcggctgcggctgtcgtcccgcttttgctggctgttgcctttggcgtctacatgtagatatgtcgggctttctttatcgcattttcgcgcgctccttgttttgtccttctttgcgccatacccctggttttcattggtctctgacgcttcgacatcggtgttgactacatgtccatgtctttctggaatggactatataattgatgttctgggtattctggcgttgactggtgtcttgactctttctttaattctactgaacgaatatacttgtccaatttgttgacgaatttgtggagtaggcacttattcattcaggtgacgcaatcccaattccaaggctgagttttgagatgacttgacctcaccatgccgacattgactcatatgatgtacctccccttgacgaaaactaacgttattgattcaccccatccaggcctatctttccttttgatttcaatctctcgagacattcaagatgtccacagccccatatttatacggagaaccactccaaaaggctttacctagaaaaatccggagatatcgcctcacttcaaaaacaccgaatattcctctggttgaacgtataccaaaactcaaaccgtgctgatatgatgggctattacggacggaacttgcacttcgagagaacactcaacgcgagatggctttgagagagaatatcgagggactcctcagggcacctaccactcccaagctagcgactcgcatccaggttcagtacttgcagatcaagatttcagatctttccaaggaatattggaggttaggacgggagtggtggaagattagaacttcgtttatggatggcccgttgaaggaatcgattattgacgcgcgcaaccaaaatggtatatgcatggtgtgctttgcgacgattgtgctgggaggggaggttgctgtgtcagagactgcggatgctgctatcgtcgcggtgggaaacagttttcggttggccattgcacagtggaatgttcctgctgtgagaaggatcggggtttcaaactcgacaaaaaaagaaaaacctcggtttcgggaggatttcaagactggcggcccttcttattttcgaatcagggatgctgctttacttgggctgatgaatggtagctggaagaacccgtcggatcatattcgagatttaccgccgaaatatatgtcgtgaaattgaaaaagaatatatatgtttgctcaatactccgtactctgaatctcctttgagaaatgtcccttggaaaggaagcttatggtgggtgttggttgacagtctggaccttcccgattaggaccgacgtacatatgtagtgttctttaattgttcattccccgccaccctcgacagtattaaactcgtaccttaaaaaaacctatattcctcaacaatcacaatatgtgggtggtttgaaatagagcgaaaaaaaacgaccactatgagattcgaactcacaatctcccgatgacactataaactaggagtcgggtgccttaaccattaggccaagcggccatccgtccttttggatccacacctatttatcatattgttggaggcctaggtggtgttaaataaatcccggcccttacattgttattacacgtcggatttctttaattctgacacttctactttaattttaaacgggtatgaactatagattggttcgttatattgagtttgaaatcccaatactcatactaacatcttataggctgtttcatgagggattagagtattcctgtctgaggagtcagagcctgacatttttctagtcttaaattagcagaacgaacgctattcttttcttctcggaatgtcatatactaggtacagatttaaaatgagaccgaaaggactctagaaagacatataaagcatatatttcgcaactaatcatgtcgatctaaggtgtagctaaagaatgagggaacataatctcttcatagtgtcatagctggaaggacaagtagctataaaagtacctccaggagcaagaataacagtacggagtagacatgacgggcttatcactctataatgtagcttctatctaatcatttcatactcttcggtgatatacgtgaatgttgcggcgaccaggagaagtagttcagagctaccaacagggacacttaataagaagcagagagctaagttaggcaatggatgaatttatttagaagattcataactacattatgactagacactcagacattctgtagccatcgcccacgtgatgaccctactctgcttaactctcatataaattcttaacatatttccatattggcttgtctaagttagctctcgtttttcaatcaatacttggaacaatcgactgatgcctcatcaaatcacgtgggttgttgtaacgtgaagttctttccttggacgacatcgcttcttgtcatccgacaccgtcacctaaccaacaccatatcaaatcagtacctgcaccacgctgttatggggttcatgagcgccatgcctcatatcaagtccgacacggagaaaagatatgagccttgtcaagtgttatttgaccaccaagttgcctgcgtcgtctggttcaaagatactcttcaccactatggtgtccccacagtcatgttcgagctttatgtccttgtacaagatattgacgaggcggcagaattgcttgttagcgctggatgggtcattgattcagaagagccacttacagttgggagtgcggaggtggaactcccacagaggcggcttgtttctccgactactcagacaacaactgttcttcttccggctcaagagtagaaatattccctggcagtcgactcactaagtgacgatgcgccgttgacagcggagtcatcaccggagaatatctttttcccaccactaccaggcttcctggatgcactgattgagagctggctagactgtccttatgaggatggtatgttgccgattcatttgacctgtcaaatctccaatctgtacgactatgtacccgctctaaaagaacgatcattcgccgaacgaatgaaatatcaacaccgccagttccacttcgacgggttggcgggaatgcggacaggcaccatcccattcagaaagcatgaacgtgtaactcgagatgcattattgcagggccagtatgaactacgggaatgttcggcgtttcatgataatgaagaccttcttgatacagggaggggtatatccttgtgaataattactatagaacttcccatcgtctagcgcttcagatgcaaaagtctttgttgattatcacggggattcagattgatatgcgaagacacggagaaacccatgaataagactaagctgacctacaaggtagttacagtcgattcgattatatacaagcaaaatctaacctacactcacatgatatatcgcccaatagaggaaataatataatctccagcaacaccagcgcaacaggcttgttattcttagcataacatttactacttgacttgcaagatataacagacattagatcatattgtgctccctcttgaccaagtatatgaaaaaagaaaagtcccaaaacggctaaaacgacacaacatttcgttttagagctcaccgggtcataataagggaccgagctggagatataaaagaacgacaataatacagggtgggaaggaaaaacgagggtatcatggaagcgaacaactccaatgggccacaccgaagtagaagaagaagaagaagtgtaagagggagtacaatacccagttgcaggtcaagttttccaaggagagcgagaaagcgagagaagcggaatacaggccacagccaagataaagggagaaacaaagaaaaggatgagccaaaggaagcaaaccaaagggtgtatatcagtcattagagattagatataatcgaagatggaatcaggtcttgaaggcaagacaatagtagccatcgtaggccgcaagtctatcctcacagaaaagggcgaaaagacaaagagggaggaatataaagagggaattaaaaggcgcttggacagaacgtgaaacacagtgtttgttcaatcgcctgactcaaaaggaaggttaaacgaagtcaattcaggcggcgacatatgatcaatcgcgcagcccgaatgccttccgaagaaggggaaatcgtttctttcgtcccgacccagcgatcacgacgtcgcgcgccgaaatcttattgtcatcggggttcgtgatttcaggggtggtgtcaattttcggatctggtctgtcgcggggtgcctcggtctctttcggagtcggagatgcacagtgagtggcattgccattgacaatgacgcttccattgtgtgctgcacctgcaccatcaatcggcggtgcggaatcctgcgtccggagaacagacgacggggcgctgtgtggctgttccacgactacctggagaggctcttcttccttgccattggggtggaggggccaagagtctggtcctgtcgaccggcgttgagaatttctcttcaccaacttggacggacgagtcggctccgaatttccggcagacacggtggttgttgtgacgccgtggttcccattcaccatgccctcgttgcgtaattgatcgaggtccatacgcgaccgctctaggggtgtctctcttcgcgaggagctttcaacttcagcttcgggaactctatggtcagagttcttgggtttcttgatgccaagtcgggcaaggagtcctggcttccgactacggggaggcgtcataatgaactcctccaagtccctctgcgacatgccacgtcgtttggccacagctgccattccagacatactgattccattctttccgcgggaacctggcgaagagggcactggctgggatgcaaaaactggtggcgcttgctgctgagggctttcttctgaactatcgtccaactctgttgagtcaccgtcgtcggcaccttggcgacgtgggataccgcggacagggcgtaacttattgtttccaagctcatcttcatcgctggaatctgcgaatcgactggtgaagacctggggccgagcttcatcctcgtcatctgaattttcgaaccgagttggacgcgccgtcttagggggcgccttggtgaacttcgctctcggcggtgccttcttgtttgtcgagaagaacgaatatcgctcagctccagtaggtcctcgaagagtcttccgcattgtcccattcgaggagccggatgaaagaggacgatgttcaaggggagagtcgttgcgctgcgttggcgattggacgcggacgttagtactagcagcaccggctctcagtgtccgtcgcatggaatggcgatctccgcgcggagaagtgcgtttgaagctgctggaggaatcacttccatttgacaattgccggcgcagagtgacagggatacctgtttgtcctcctacattctggaaattcggagtaatggacagagacagtggacgcggtttagccttgccacctcgcggagaagtatcgttgcttggccgccgaggatcctgcatactagacgtgccattcacatccaccgacacggcccgggttcgcgtcggaggctgtgcttgaagactgccatgttgagcggtggcgttgcgagtttccaactggagtggccctggcgggtttgcaaaaccaaatccatggccaacagaagaagcaggggattgctctaccaggcggttgaccgaggttggagtcggtgtcacggagcgctcctcctcaagtgcttgatctgtcacatcttgtgactgactatccacgatggcggctcgaccgataggcctcggtgtagcgtcccgagattcacttgcattctcctcggtcggcgccgacctaggggctgaccggctgtcgacaatagcattgatggacccaaagccatcaccgtccatgtcttccatatcttccgctgcatcgctgtagacgctatcaccggactcctcctcagtatccacgtcttccggatttggaacggggctcgccgcggcctggggtctagtcttcttcgcagtcgaattgagactgcggtctgagttggagggagggaacccgcccggaatcctatactggtccatgctagatctcttcttgtcaacactgtgccaagttccatctgccgggggcgtagccggctcgacagcaatagcaggcacagacaattccgagcgcatgctggagtacggctgtttctcaatgacgtcatccgtgactatggtctctcctttggcccctggcttggtatacaaattcggagtatgcgaagtgcggttgacagacaactgctccagaacgctcaagctgtgtggccggaagtattcatttgagagcgacatatccggccttggtgccacatcagatgcagacgaagagctggactcattgtcactgaaatctgggattggcgacctcttgagggcaccgcctcgggtcccccgaatgctaccgaaagatggaagaacttgccggggttttatgactacatcccagtcatcgtcactcgtaaactccgcgtgcgacttctttttgccaacaccaagccaacccatacgagatttggctttaccgccgggcggggaatcaggcgtatagtcttccggcgaggtaggagggctggctggtacattgacaacctcagcctcatcatcgaaactgaccttgacagactttttccgggtatcaatccgggatccttcgtctgaagccactgatgtaccatctgacagctcgctcggtggtaggacgcggccagttggcccaagcctcctatcaggcgataaagaggttcctcttgagtgtttcaaggctgatttgacaggagatactgatctgagtggaggctcgtgaacttgatcaccggctccagctacagagagcaatctggaaaaacgtgcagttcgacctgggctgcttgactgacggtgtggctgctttatttgcagttccgacgagggcgatgagggcactggcgctgactctacgtgatcagtagttggcgatgcactcgtcatccggtttctgctttgccgttcagaggtatcttcgacattcgtattgtcttcgggctcttcttcttcccgaacagtggatggccaccgctcaggaagagctcgtgaggatgggtgttcagcttctacgttagccacaacaggcaccgcgctaccggtatattggtccagagaatcgggctctataagcgaattgtgaaccttcccagttcgaccattcgcactcggcctgttcatgggcacgccaaccgattgggcagtagcatctgcggtgccagccaaaggaacatgtttgcttacaacagggctttcctctagactgccagatcgctgtgctttaggcttcccctttggcaatttgtcagatacctcagcaatcgattcttgaatagcatcgtgaaggctcatcggattgctctcagacatcgtcatcggcgaggtaggtcgcgaacccattgggtatgagaaattcactgaattccgactcgtcgaccgttccatttctggaacggtcccaagactagtcacccgttgatacgtggttggctgaatcggaggccctcgcccatgttcccgatccacacccctcaccccagagcgcggcgaagacgatggggaggaacgcatcgacggctccatactcaccgctcgtcggttcggcagtttccgcggcgaaaacttcgtcgggagagtaggtaacggaggcacatcgacgggaatggcccctggcccgacgggtccggagctggtagctgggcgatggggggattggtcgcgaaaggtgcgtgcgctcatcgaactattactgctggagcggcgcagcgtggcactcacgctggccgagcggcgaccgttaacggggttggcctgcgactggatcgaggtgcgccgctggaccattcgttttgtctgcacattttcaatgggggtcggggtgggtgtgcagttgcggagcgctgttgccgccgcggcggaggacaagctgactgtggagggttgggattttaagaatgcatggctggcggcggactgggcagagtgcgcggcaggtgtggagagtggctgggaaaaggagtcgtcagtttcattttcatgcataggttgcaggtacccgttggattgcatcaggcgctgcagcgggacccatctgcagatagggagatctgctattcttggtagaacacacctgatgatgggcagaggcacttctcttgcgacgcccgaagaccattgttcagagtcttgggccttgtagggatcgaaggggtcaaagatcggatggccggacactgctcggtgcagcgccgggatccgaaattgaagtggatgaagggatgtggatctccagatgattatacgagggtagctatagcaagaagtggaaactagaaaactgagaagttgaggggaaacaactcgggagggatcgaccaagtcagagagccagtcagaaacaaggagatatgaaggtggcacgaggtaaggagagctgtaaaaaaaggcagaaagcaggaaaaaaaagataaaaagccgttcgagacagatccaggaagatccgagatcgagaggaacttgcgtcatgactctgatgggtcaggcaccagaacttggtttaccgccttggtggaccacgttttatggggtatgacctcggtttgtgtacagcatacctagattcattcttatatccctgacacggcatatatctcactcatccaacccacatatattcaatcctaacaatggcccttccacccctccccctccccgcaggcgtaacaagccgcaacattcaaacaaacgatctaaacatccacatcctagaagccggccaaaccccagagaacaataaaccattgattatccttctccacggtttcccagaaatcgcctactcatggcgccgcgtgatcccaaaactagcagcagccggcttctacgtcgtagccccagaccagcgcggcttcggccgcaccacaggctgggacacgcgcggctatgaagacgtcgacctggcaaccttctcactatccatgctggtgcgggatattgtgcttcttgcacacgcactaggctaccgttctgtccggtgcgtcgccggccacgactgcggcgctgtatcagcagccgcgtgcgccctaatacggccggatttcttccagagcgttgccctcatgagccatccgtttaacggggccccggatctaccgtttaacacggcgaatgcggatgccgcgactgggtctgagacggcggcggcaggtggggcgggtggtgcggaggggtcggctgctgcggcggggattcatgacgcgcttgcggaactcgggcgcaagcattataagtggtattactcgactaagcaggctggtcctgaaatgtcggatctggagcctgacgagatgcatcgcttcttgcgaggatactttcatctgaagagtggttcgtggctggggaaccggccacatccgcttgggaagtggtctgctgctgacctggtcaagttacccgggtactatatcatgccgttgaatgagacgatgcctggaacggtggcgcatgatatggagcatgagccgtccggcggtctggcctcgcactcttggctgccggatgaagagctcgcagtttatgccgctgaatatagccgcacgggcttccagggtgggttgaattggtaccgtgttcgcaccgctgctaggggccggtatacgaaggactttgatgtctttgctgggaagaagctcgagccgccttgcgcttatgtctcgggcaagctggactggggcaactatcaggagcccggtgctattgagaagatgaagaacgggatttcgtgtgctgacctgcgtgtctttcggcttgtggatggggttgggcattggacgccccaggaaagtccggacgaggtgacgcgcgcgattctggacctgatcggaggtgtgcgcgactagattcttaatcgatgctattgggcaattacgcttttctcgattcccatttggaactgtgaaagaggggtttgagagatatgatgacgttatgatgggctatgagctgaacaaactggatacattgcatttgcgctcacaaatatagagaaagccctagagcaattaatgatgaccgggagctgaagaaccttagaacctcgtctctttggacaaccaattgctgattgtctccagtgtcctcaaaggcaagatcgcaaggatgctagagtccaaagcctctccatcatcccctttgaaaacttactgagcgacgttacgtccatcttggggttgcgaactagtattcgcttcgtgacgtcatccgaagatcgcacattggcaataatcagcattgggttgccacaaatggccccaagaacatacttgatcagttgataattgcagactccagatggaagcctttcccccggagatagatgcttttcaacgtaccgcgagttgtttgcgttcaggtatgccgttttagtcagaacgtgtacagctcggcgatatcagaacctcagcagggtgagggggagcttggttgtatgaatttaaaacccaattttgagcaaattggaagggacgtctactatagaaagagaaatattttatgtcttcatattatatgactcattcttcgactcatatggcggctagcattttctatagaatctgatccctacgatactgaatacattcaaaatatgcttttatatatctctactctgaagtctaaagagtcatattcgccagatgacgtgatataccccgtagacagcaattggtcagagaatagattgaattggatacttgcttgtatcaacattgttgaccagtaacaggtgaatagacctatcaaatttcgaccagggaatggaaacatccggtctccgcggtgtgtgcatgcgcccgaggctcccttttcttgacctctcgcttgtcggttgcactccgtcgggggatcgaagcaaggctattagcatatttagcaacagcgaaagcggtagccttcgaattaatcaggaatgcttcgtggttgagattcttgaagttgtccccgacagcatggtaattcacatcgtaggatacgtttgcttggcctccgaacagttttgcctctgcttcggtcttgaggccttcagcgccagtgaaaagtccaccggcgggaattccacgagagatgaaaccctcgtagtcggatcggccattaaactcagtaggaacatagggcagcttctttgacctgaaatatttctcaaacaaagcctcaatctgggcagatcccgctggtccagtctggttgaaggcatctccgtcaccatcgtagatcatgagcgcatagttgggcgaggcaatcatatcgaagttgaggtagagtctgatttttgctagttcatctgcgtccaggtgggaggtgtaatactcgctacccaacaggccgaactcctcagccgtccagaagaggaatctcacggcattcttgacagagaatcgcgtcaacgcctttgccaccacgaggttgctaatgattccagagccatcatcattgatgcctgggccggcatcgactgagtcggtgtgacctcccagtgagacgacgttattgtgatcaccgccctttgtctctgcaattacgttgaatgtagtgcgattctcgacccggctgtccagtaaaagagacacagtcacagcgcccttctctgctgcactgagcaggaccttgccgtcgacatcagaaactcccgcgatggcggaataatcactggatacgccacccagggttccactaagagaccctgcaacgttgttatagacaattaccgcagcggcattggcagcagcagcaagtaacgacttttctgcgaaagtgcattctccacgctggactagggcaattgcaccagccacgtcactcgggtagtctgatgcactgcatccgagattcgagaccactgccagctctgcagtaacctccacgctaggactgtaggtcatggccgatgctttgatagactcgccctcaagcgtcagcgaggtatttgcagtagtccatgtgtgcacctgcggctgcttccacacattgtaatagccggtcttcttcaactcgcgatagatgaagtcaacagtatcgttgtgtgctgcactgccaaagacgcgattacgctcggggtacgcataggcgaaatcctcaagctgttgggtgcccttcaggaggtctttcagtcgaatggtagagggaaagtcattctaataagtcagattacctaaacgacggcggagatccaacatgtatacataccggtgaaacaaggggcttcctccggccagcttcagccaggcccacggacagggttatcaagaaaagccacttcatcgttaagtaatgcgcggattgatgaccattctgagccaggggcagatgtgattttatacccattcttcgtattgtcggcgaccatcacgcgatgataaagcgcaatggtgcgtgattggcagggccccgatggatacgccaagaggccggcttgcttcacttggcagaggaggaagcactttcatagggccggctattgtcctgcaggcggaatccgacggcccttggtatgacaaaggctgaggttaccttgccaaggcattgaggtgggaaggtactagggatagataacattgttgcgggctgttgcgctcattatccagcacattgagccttaagactaattatttagtccgtattcgcaatatatttgccatgatctgttgattaggattgtaatcgtaccataatcagattcagacggccgtgggctaactcagccaactgcctattagagatcagcgttgcggagtactggaatcgtgcctaattcatatccaccttggaaacgcctatctcaatcatatcgtcctaattcataaccgggcatttaaattcaggttcaaatgcattcttcggagttccacttccgtatgagtattacacgaagggtattcgttccgcgtatagcaggctcatctgcagttgtgggaaagagctacccccgcggaatgaagtaattgaatcgcttggggaaagcgcggatcatgagtgagaagatgagaccataggcagcaggtatgagtggctctctttagagcaggaaactgcttgacaccgcataaaacgcttgcagataactatcatcggcgaggacatcccgaggtctttccgctgacgcaataagcgctggtaactaaggtatccagcactccatgagcctccgctgagccaaagcctgttctctacgcacaacatggtctgcctacgtccgtacaccgccgcttcctaagatggaagaggctatttcgcaaacgcccttgaatcacctaggacacatcttcctcctctaaccaatgtcgctcgatgatatcctcctagagtgcagaactatacctacggtctactctctcgtgttacccggctcttcatcgtctggaagcaattcatttccctcgtcagtttcgcatattcgctgtgggcctgttggtatctcggctactccgtggcggaccttgtcgtgagatgcaatgccgcgaacaacttcagtgctgagtgggttgatggtagataatcgcataacccaatttgggtcgaggcctctcgaccccagactcaacccggacccagtgactggggccccagaaaacccagtttggacccagtttggacccagtttgatccattttttgcataaattaggtcttggcgttcataaacctgctaaaccagcagaattacacacattattagcgtgtttgtatagtttgtagtccaatttggctccagaaccagcactgagttatgcggaaacatagttcgaaagggagcactggtgtaagtcataccgctgtagggtatacctaagtaagttggaggggaagttgatagtaataaccttggaagcattcagagacataaaacagatactagagagaggtgtggataggggccctcggatgatgcagaacagtgggccttgactcgatatattagaataagatagacagagtaaactctgataaatcaaaatatctgaataatgactttgcacacttatggggagcccgttccacggtaccctttgactgttgtaaatgaagtagatctgttcattggccgtcgaaagcaacgtggacttgttaaacagctttgacaggataataagtgtggcccatacatagttcgttcgtcagcctgggtgtttcgcgattgttcatctaagtgcaaaaactgcaagacacaatgccctttagatgttaagctcgatggagaaatatattgcttcttaaagccgtatatgacgagtgtaggcacccacgagcggcaagaatggatagcttggttgatcgatcgacctcgagaaaacagattgaagtagaacgtcgctatagcctcattaaacaaagatgaaaggccctcaaatattgcagatctagacaatgctcactacagagtacaagggtcaaggcgacacctgaggtctataaaaaagtcgaggcaaccttggaaatggtcgggcatgacagaggtcagcgaataggaagtcgtgcctgcccgaggcctaccatggttatggaatatgtaccccaggatcaatggcaactatattttcacctacaacgacaccgatgaaagagaatgttgcgattctcatctattcacatgtaaattgaaggaacatcgaaggcaaaaggcgtgaaaatttttctcctcgccaagccaataagatacatatgcaagatgcgcttctgcctaacttcaatatgagctagaaaggtaaaacagcggagtaggtaatgtggacatggctctgatttttgcattatgagctagctacaaggaagtcatggctgattgagggcaaataaatccattaaagttttcatcagcacacaaaaagttgcaaacatgagatcgtcatacaaaggaaaattaaatcacacgagcaaaaggaaaaggaaacaaataactatcatcacaccatggacgagggacaagcgtatctagcccccctaggagaaacccagaaaaagaaaattacagacgggaaccgtggatgaccttgtagtcgacgacgagctcacgaccaccatcgttgatgacgagggcacggacggaaccacggccactagcaaaggcatcactgatgcgctggtagaggttgccctgggtgatcacactgataccctgcttgacatcaccgctctcggtcatggcgacgaggctgttatcatcacggaggtccaggatgcggtaggtcttgaagacggggccgagcatggtctggacaaccaccgaaggagaggggttggcgacaaagctagactcctcctgcaacttgcgggtgaagaggtcgacaccgaggtaacggtgctggccagtctggggggagaccgagatgcggatgacctggcaagggcggccctgaaggatcaggatgtccccgacacggatgaagtggcaagggatgggcacggtctcgccagaggagccgcggttgcggggctcgacgacgcggacgtttgcacggggggcagcgacctcgccgtgagactcctcatgctcagagtgggagaaggggtgcatgacacggtcggcagcgcgctcgacgccacggcggaaggagtggtactggccttcgtcgtcgtagtaacccattttgcgagtaggggcggtgtcacgggtagtggtagatgtagtggactggggagcgtttacttgggatgaggtggagtaacgagcacggggctgaacttcacgaaggtagacgtcgtctaccttgtaagagtcggtctggagttgggcggtccggtcgtacgaaacgtcgacggactgaggttggtaaccgtaggcggagtctacgggctgacgataacgacggtcgtaagagacgtcgaggtcgtaggagggggaggtacgttgacggtagtctctttcagtgaggtcgagttggttctcgacgactttatcgtagacttgagtgcggtcctcgtagtcaacagtgggttgttggtaactggggtagctgggaaaggttgtcagcccacatgcacgggtaccatatacatataaacaaaacaagcgagacaccgctaattgaagtggatcggggtttgtggacacgtaattttagtccccggcaaaattcgcaatcgctccatcccaagataggagatctcacaacaaatatcgatagttcagctgcagggccccccctccccaaannnnnnnnnnnnnnnnnnnnnnnnnnnnnnnnnnnnnnnnnnnnnnnnnnnnnnnnnnnnnnnnnnnnnnnnnnnnnnnnnnnnnnnnnnnnnnnnnnnnnnnnnnnnnnnnnnnnnnnnnnnnnnaaggggagacctggggctggagtaaaaaacacaaaaaaaacaataccaggaaaaacaattacataccgttcacgagtaagctcaacttcaggggcgtagttgtgctggtaggactgcgagtactgctgcgattgctgcttgtactgagggtgctcttcttgaatgcgcggacgctcttcttgaatgcggaactcgatgtcttcctttctgtgaacagaagcgggaaggggagcagaacctcgagtatcttcccgttcgacgcgcgaagtacgatcgaaattgacttctccctctactcgagtctgagtagtttcagagacagcgtcactccggtacgacgacgggaagacactgaaggggatggggacacgggcgtcaaagtccagattgacggacttctgagcgtcttttctcgaatgcctttcgaactgtcgttaaacaactcgaaagactaaacaagaaaagacttgaaagggaagtctttctcggggtggggaggaggaaaagagaagttcttttgatcctgcagagatagatagatgattggaatggaggggaagaaagataagattaagagccggggaatgttagattgtaggaatggaagaggaagaggaaatggaccagcacagtcggcgagcatcacgattatttatgccaggccatttgtttacgccgccttcccggtttgagttctcggctgatcaccgaggtactctcctccttactgtctctctacgctatctgaattgtcctattagaaccgcacgatatgtctgatggaagtcctccttctcgttctggtcaatcattcttaaaccccccaggaaggcatcttcattgatggatacccgagctgcaatcctccatacacatcgggccctttcgcatggggggctggccagcctgcgcgtaatatcacagcaccactactatatcgctatggcaacctccggggcgaatcggacatctggatcctctttgtgccgatcttataggctccatcacatcggcacacttgcattgggggttgcggagacaccttcagcgtgattattattattattattattcattccctcggctgaaaaaagcgtccgtttgttttgatcctgccacagggcgtttgccaggcagccattggcctatatctggcactattcacaacatgttccaggatacgagacactaatacgaataccaataccaataccaatgcacgtctccaccggcaaagtgattcatcgagatcattagaccacctttgggtcccagcccgcctcgccccagctactgcgaagcaccagccagccagtgcatgcagctcatggctagaccctcttaccgcccaagaagccgggaaatatgtttcaaatagcggtaattgcccgtactttggttttctcataatgagacatctgaagagggtggttaccagccgcgtgtttatgattccagtcatgtcgccactgctccaatggagtgattatcttgtttatgtatcccgttttccgaggtccacggaatacccggtactatggtaccaatccgtgctccgtaagtggatgtccattacggagtcccatactccgctccgcacagagaacggagtcatactgcagaagaatctcagcggagcacgcagtacaacataatatcgtctccatagtagagcctagcaatttcgtacatgtttctatttccacttgttccactcactactccactgttctttttcttctctcattggttctttcagatattttcgaagtataggatcagacccctttccggggtcaactcagctgtacatttacttacagagtggtattatattacggtcgcataatttctattgacagctagaagattatactatcgtaaaggtgcaaaaaaatctatgtaattagcgacatacgcccgtatttcttcatatagtagctatgtagcgggttcgaaaatgagcaagagccacaagtttggcgtttattgcgcccgataccatagacttatacgagacctttcctttatgtatttcggcgaatatcatgcgtggtgtaacgctcgaagtcttgatatgcgaaaggctggtgttaagtccctggcgatatagacgttggttatatataatttccgatacaagaatgccatgagaacatatttcttgtatccactactccatatacgacgtacatattgttgaataatcaagaaagcgataacaaagcgctcacgcaaccgaagttatgctctttgagaagttgcagctgggatagctctagaccatcgcgatgtttcccattcgtcacggaatgcctcgctctccgcattttgtgtcttgtatctccataggagtagacttggttggctaccagttcgccgattacagatgccgaaatcacataaattgatgcccaattccgagcccatggtgtaatatgcaaggcagcgaaaaggtaaccggctgcatgttgactctaaatatagtcggtggttcggtcttatgttcgatacagaatgcagcatatcaatgtattaaaaggctgtaaaaggctgtttggtacagcctatcaacaaggtcaagcaagatcccatccctggagtccttcttgataatacgttgattcttctgccattcagctatgaaccggtacgttatacatggacaaatcatctgtctataatatactccatacttgtggaaaaatatagctcgaatatcggtaatggacagaagagtagtgatactattcccactagaaaaagaaagaatttcttacaagacaaacagccatatatcggccctgacttttcccaaacaccaaaaatgaaacccaggcaccagaacggaagacacaagtggaagctagacaggaagaggacttcgtagaagaatgaccataccgaacagtaagacataagagtcatagcaaagcatggatcacaaatagatagatagaaaacaacatgggcaatgaaacctcgaaaccaagcgagatgactcgccactaggtacaaaccacccttgttttcaaagatgattcatgacgccggaccagtatggaatgacatggagaagagaacagagaagaggaaagaaaaaagcaactgagatgggttctagtatacatcgatggacggtaaaagcaaattaagatgggtatcgtgatgcgaagcagcggataagctcaaaagatgatagagcgagaagaagagggaaaccagctgtggtagtggcggagactaccgttctccaaacttgccgaactcctgttgccatttgagaagatggcgagtgagcacgtccatcatctccacgctgctgagctccttgaaatccctttcatggttcgtcgactcgccatagccgccgtctgtggttgcggggccggactcgcctccgtcactgcgcgcggatggcatatcgttctcaatctgattgaccatgctcttcaagagtaggccctgggcccggtcaccgttgccagtaggtgtggaggagttctcgctggaaacggccatctccacttgcatgcgtgagatgaactctaggatggctgctactcggcgcttcatttcgttcatcgttgttcgatgtggatgcatgtgacgcggcctgcttggccgtcctgactccccaccattcacgtgtgcgccattaacaccgctgtagccaagtcgaggggagtctccgccgacttcgtgggactggccgcggcgcggcgagttcgccatataaccgacatctccattcccattggtgtcccggtcttttgtatattggtttcgaccaacacggccgcgacgagggggaggtcgaccggacttgcgagttgatggacgaacaggagcgggctcttgcggggtaggggtgttagggcttgcttgagacggttcaggctctggcggcgctgtcttggttggggaaccggtttcgtgctcggattctgttgtagctgtgttagaaagtgaaaaatcgtccactagagctgtgtcacttaccatctcctttgcgccggtttgatcgttctttccgacgtttcgccgcttcaggagcctctgtctcgccctcgtcggggtcatttttaggttctttctccacctgacctcgagacgtggctctctgtctgcgacttccgttgactgcaggctttggtttcgcctcatcaccagaaggcgggtgagatgctatattgctatgcctcgagacggcgctaggtgagggtgaagtagttcgcggacgtttcgctcgttctctattcctgggtaactagtcagccatattatcctagccaatgccatgcagcttgagaatacgcacgtcacactgtcacttcgacttcgcttgcccagatgtgtgtctgtctcatccgcattacttttagtctcagccttgctctcctcaattgcgcgtcgtatcaattcttcttcatcgtaagcagcatcccggctattcattgttgatcgtcgcttggcgtgcgcagcggcactctcgctggtccgggacttgggatccctggaacgccgcgatatatctctcgaggaggcacgagaggacgggccgggggacgggggaaccgccgggacaaccggggcgactggcacgtcaggtacctcaggcaccgccggggttggggtcggggtcggtgtcggggctggcgctgacgctggcgttggtgtttgtgatggcgctggaggaggagggggtggtggcggcggcggcggaactggttctggtgcaacaggaaggtaggttgaggatcgttgtctgcaggattgtcagtatgcttcttgaaaacggtatagatggtaacatagagtagtcatttgtatctcataactgctcgggggagtgatcgtgcccgaggctgggtcaaaaaaaaaaagcccctccaagcagcaagaacaaagcacatccacggagatatagattgacgacaaatgcaggaataatacgtagggccgagtaaatgcaaagaatagcattgtttcacttacccatgaggttcatctttgatcttgtgcaaatccttccgacactcctcacaaaaatattcgtcaggactcgttgcctcgtccatgattccaacacaaccaccatgttgccaaactttacacaagtcacactggataaacatgctcccaatatcatctgatagaggatcagatagatcagtggggacttgtcccgactccagcttgatggtgccgcgaccgagggcctcgcgacgagaagaaggcaagcccggatattcttgctgaccacagagacatcgagttacttcctcctcgtcatcatctaggtcatcctcgtcttcttcacggggtggatcatcgtcgtcgtcgtgagcgcgttggcgctgccgcgtatgtggagggtcttttgagccaccctcagcatcatcgatggactgagagcggtgactggtcgattcgtgaggagagggattcttatgattcgatcgagtgcttctctcacgagtaagagaatttgaggagctggaggaagagttggtttgttgtaggagggcaggagagggctgggaggtgcgagcccgagaggaacgacgaggagacatggtgggggaggtttgagtatttgaaggaagtataaaagagagcactgaaagccagattaaggagaatcaacagatttccgagacgttggctggtgtggttctaggtaactcgagaaaacccgtttgcgagggagctctcgcgcgcgattgagagctcttggggagggtgcagagtcaagtaaaaagaagcaggacaattggaaacaacagatatgtataaaggcgtcgcaaggctcgatgaagagcccgatgactacatagtccgagaaatgattccttataatggcggggaggagaaagagaaggaggaaaagcaccggaacgggactccaaaagatccaatcgccggtttccccgctctcgacgcctctcgacgcgcgaatctttcaccactcatgctgttcgtgtttcatttcctttttgccctacatatggtggaattgattgctggttcctatatacctttgacattattttggctatatatgttaatgcacaatggttttgtggccgactaattggggttgtatcttccactagcacaacacgatggagcaatgagagagcttgcaagcgaaagagagttgattgataagaggacaagacacaacatacaatactgtatagggctgccgatattctcccggtgtgatatatcccagtggaaaaaacagagaacagagagagggtaagaaaggtctaacatggattgacggcccttgaaccgcaaaactcgaccttgaatcctcctatgctgtgagaacaataagatcatcaagaattaatgttcttatgatccacatcgtctcaaattctgtatgtcccatccttcgtaccgagtgtgcctctcatttcgggccgaacccgttttcagcgtcggcaagacaactttggtctagttgcgcaatgcaactcgtagcatccattcttcccaacatatagatgatgtagttattcctccgaatatgctctgggtgcattggtggttggaaaggcgaaatgaggctttgagcaaagccctccggaggggttcaatcacacgcgatcgaggttcgttgcactagttggctaggtatgggttgtactgcgatcagcaaatccatagccaacattgaatcaatccctcacaccagctctgagatgctggattccctgtggatgcggatatcgggagtacctatctgggagatgatcggagggcgggctttttttgtctcccattagaggtttttgtatagactgatgaccaatgaccaaaggtatagtgcatggtagcacctagaagatcagatcgaacatgtgctctataggtgcctagtctgcaaagtagttcttcagaggcgtgtacgtgtaatgccacttctctccgaagtcattgggtagagggattgccgaaagtagattagcctgatttctaaattcccgtgacttgtctctttctcttcgtatccctcaacccctcctagtagttattcaagttattcatttgtcttgtctctaacactgaatctggaatcgagttcactcgattcccaattttggatcctcgtcccatcgattttggatatcgaaggtgctgagtaatagcaccattttgtgggtaggttgatattcgtgtctccgggattgtggacagcagaggaacgccaggattggattgaatcccagttgcatgttgatctcactgcctgtacgcttctcgtgagcttatttttaaaaggacaaaagcttatgactgcggatcacagacattgaagacattacttgccaattcgacattcaacactgtccccgacttttggattattggccccttgacaagaaaatacggtggcgggggataaaaggacagagcgaaagggctggaatatcatcctcttagcatcgtcggcggttgatggcgagcgtggatatcttgcatgatgacagctacattgagtatgtctcagggacatttggtccggatgatcggggattccccaattcaggaaaacgatcaactagtggactgaatactgacgatgccatgtagacggggtgttcaattcgtcccccgatacaccctctgccatttaccctgatcgtttgatccgtcctctacctagacggaccctccgttcacgcctctcctccgatgctgccgacacactattctatcctcctacgccgccggcgtctcaaatattctatggtgtctctgcggattctgaagaggcggtgaatgaatccaaagtatatgtgcagcagacagtggatactgaattgtcaccggaggttgagaatcatgaatttgagacgccagtagagttggaaagcggtgatgaaagcggtccgatggttgttcgaaggagtggtgttatccggagatcgtcactatcacctcccgtgtctggcaatccacatagcttcccccacgacacaccgcagacaaaatcttcaaccggggacggctacgacgcgtttgagaatacgaataacaagaaaaagagaaagatacctacccccgggaacttgggagggcaccattctgccttgtctccggagttcgccagtatgggcttgacaaactcaacccccgtacgggcccctactccaactgatgccactggcacatattatgggagtggaaaccccgcgtctcctttaggaaatgggatatctggttcaggaagaggtcggttgggacgtcctactgttcgtagcagcagcagaaacccgttatcgcccaatgcccagcatggatggttgaatgcccggacgcccagtcggcgagacgggttgatgccatcccctggcccttctggtatgcaattttccattttcccattgcattatttgctctaacttctgtaccaggtgaatcttctgaccagggaatcatctctaccgcgatcgccaatgccgcaacgctctcttccccacctcgaggtcctggcaacgtcagccttttggaaaaagagaaagaaaataccactccgacgaagacacaattcacgttcacttgtgaatctgactcctctaagggcatggcgatgcagcgaaattattcaatcccttatcgatcccccacttcaccactcggtccggcaagtcaaaaacagaggggcatctccacacaagggacacagactagctccatgaaccaccaggccccacccgcgcaagcacccgctcaaagtggggagccgacccccgtgggccccaagaaaaaacgatccccaagcagcacatacgcattgtctgcacgtcaacgcaagatccagcaacaatacacgaacttccaccatccccctagtctcgaggatatctggatttgtgaattctgtgaatatgaaagcatctttgggcatccgcccgaagccttaatcagacagtatgagatgaaagaccgcaaagagcgcaagcgactggcggagaagaagcggcttttggagaaggccaagatgaagggtcgcaagaccaagaaggcgacgaagaacgcatcgaagaatggctcacagcagcaggcatacgaccgcgcttcggctgacaactcctccggcggtggatcaggtcttcccgatgatgaataccaaggacatgagtatgatgatgatgaaaatttgccgatcccaccttctgcccctgcgtcccccaccgacctcaagcctccactaccgcccactggaaattatccaaagatagcggcgtctgttccaggcatcaagggtactgcgaattctggagcaagtcgaccggcctagtcgtccttctgcgtctcattggtgttcttttgcatttcatcagtccatcattgcatttggtttttattttcgggttgacaggttgacagggtgtatggggtattttttggaggggtgttctcgggttgttgcatggaaggaaatcgcctctcagcatgttggtttggcgagcaactcatcggacaaagtcccttgttggagtctggttcctggttatctttgtacttgtaatgtccatgatgtgtatgttctgaatcaaatgtgaaatgatccaatgtccagtctcgtagcatacattcttttcttagatcatctgtttaacttcatttgtatataccgaaaatagagaggactttttgattggatctcgagccaccacacttgaaactatcccaacctcaagttggcgcgcgcgaactgcaaccccactagataccaggtttcggacccctgcaataccccagcttgctagctttgtgttagtttttgattccaggggtgttcggtgttctattttgatccatgcgtttcatcttcttgttcccgagtgattgtctttggatgaaaggcgaggatggacagtggggaagctctagaaccgcgcgctcgaaggagatgcgtttcatccggggccgcagatgccagaaaatagcagaaaatagcaacattgcgctttgttgccttcaagttctgacgaatatgccccggggactgagaatagggctaatctataaagaacagccccgggccattgatgagagtcttccattctattttcatgcatctttctttcattcattctcttctatttctattatacctcttgaatacgacgggccactttctctttgtcccaatatctagtcatacaatctcgacaatagcttcattcctcttatttggcatctggtctgccgaatcttggaatactcctctcattatctcattcgacttcatactccttcttctcgatataatatctgcgctgtgcgccatatcctaagcacttactattgctttcattcgcaccttccaatcaacaaccacctaccacatcaccataccaaatccaaagatgtctttcctagccgtcccactcctcaagctcggcatatcccaagccaagaaacacaaagccaagaaagacctccaaaaacaacaaaacgcctacccaacctacgaacccgagcaacacccaatgagcggctacccagccggcgccacgccggggacaaccctccacttctctccaccacaagagaaaagcaaaagcgccaaactagccttcatattcttttcaacgttgcgcttcctacaattcgtcttcggcctcaccgtcattggcctgtacggcaaagacgtgcatcacgaccactccgaggaagacacctggcacgcgaaatgggtgtacgcgctcatcacggccttcctcgccaccgtaactgcagccatccacctcgtcatgccgttcgtcatgcgcaaagctaagcgcggcgtcggggctggctccggttccacgatgctgctgctgccgcagtttgtgtgggaatttgtggtttccgtgctgtggttagcactctttggcatctttgggaagatgtatattggtgttcatcctgtcgtctcgaagactgatgctgcgacttcagcgcttggtgatgcgtcgaagataaatcggatgcgccatgcggtttgggttgatattattaacttggcgttctgggttatgactacttcgtgggttctgctgcgctggttgaagagtcgcaggtcagctggtgcgcttgatgctgagaagggtgagcaaatttaggtagttgagggtgtgaatgctcactttgatagtgggcttgatgggtgagatctgttatgggcagatgccttgatggcatcggatggaaagggagtttgaatagcatttgcattcgtttgtttcttttgtatctgacatttggactcgggagtcatggtgttcagtgcttttggctcttttcgtggatggcgttctctcaatacatacaaaacattaacgttctttttgagatacaccccgatgacttcaatttcaatgtagtctcatctagagattaattcctttccgtcatttacttgaaaaatactgagagctacatcagtagcttcctgctttcttatagaaaatcaaccgcttctctttttttctctcttagctcctgagccttacatcaatatcgatgcttttgattcgctcttcctgcctcgtagccttgtaagaagtccgtgtcctaccatgagcctgctgggtaggttcacttggctgtacagcccactgctgtccccgttctcaagggagcttcgttgctgtcatctgggataaagagaatgaagttgtgatctctcactactgagagatgaaccttgacctagaggctcacaatttctttaggtaaggctcaggttactacggaatacgaggtgaaattcggttagactccaatacaagaaacattcatatgcgacttatttatttctgtagattcgctggctaaagcctatcaaataggccaaatctggtatcccattcaacagatatccgcccagtctccctcaatatccccaggaacgtcaaactgcggtccaccaggcaatttgacggggttcttcaccactttgaacaatggcttcaccttgctgacctcctcagggctcagcatcgggcggcggagagtggaagcgcgcgggaaaggaataggagatgttgctgctgcttctctaatagcctcctcagcgacggggtcatcgacaaagtcgtcgtcatcgaatggtgaaaaggatgggatggcgggctttggcgcgggggcaatctcatatcccaggttgcgcgtgatctcgtcgtcctcgtcgcggaagctgaggtgctgcaagagaccgagctcgacatagctgtcttcgtagtcatcggccttggtagtgggctcagagcggcgacgggttggaattgctgttcttgggatagacacctgcgaggacttgcggtggttgaagactgggcggcggcgtgggcctcgtccgtggcgtgtcgcagtaaggtaggtcttcttgggaccatgctggctcaagctctccagggcagtggtcgactcagaagtcatggatgtcttcttggagtcctggtcgccgactttcttcggagcagtcaggaatgtcttcttggaacctcggtcgccaatgtcaattggagcagtggcagactcagaagctatagatgtcttcttggaatcctggccgccaaccttctcgggagtgagggtagacttggcatccgtcaaggtcttctggcgacgctgacggcccgtgttaccgggagtagaagtggaagtgtgatcaccagccatgcttgtggtgggtgaattagaagggttgagtgttatctttgtgccgatgggagtgtcaaggagcaatcgagttgctttatatgtttcaacctgtgaaggctgcgactttctcacgattgagagaggaggagaagaggctccgacagcgcagcctggctgattcttattgatgcgagcacatgagtcactaatacgcggttcatatggtgcgatgtagaacgcatttatgtttacgttttctcctttgtcgccagtcacaggcaacggtgggacagtcaccctttgtccgactaatattgccggcgccttaatgcgtagtataagacgatttagggtacgggtattaacgcggctcgagagtcgttttgcaccccatattctccagaagagatgttcgaggcgacgctcggtctcatctttgctggccaggtgcgatgtcgagtaggctgtttgttgtcagccagcccgtttataacgagaccaggagtagggagtgttatgttaccttgccaaaggttcttgtataagccattacttaatgtaccctgctgcaagatctcgctagcagacacacttgacatagccacaagaccttgggggagctttggctccatcttagatgttcgttttggtagtcgagcttgagatgacgagataattttgtacggagaagtataagatgagtggcagagaatttgcaagttgacgaggggtcaaatgatgttgaatggcgtggatcagtcgtactgatgtaaagtcaaggcttggtagcatcctttgtattcagcacaaacagaatgctgacaagaaaagaaaaaagagaatagaagagcttgaccggcaagtttcgaaaacaaaagtttcttgcgttattcctgtgtcgcactactttccagtggcgagatgagactttgaagctgcaagatattcaaggttgaacttgaagccgaggtaacacatcagttagagccttcgaacatgctccattggggtttaggtgcgcaagtcatgactttaaaagctgcactccacaaaaaaacagaaaaaggaaaagtcgagaagtccagagacaaaaaatttgaggaatgtagtaccccagggttcgcccttgcctgtagggtggggggaaaccccttagattcagaaccggactgaatagatcttcgttaaatctccaattgtagatctccctagatctccctagatctttccgaagccttggaaagactaaattcttcaagtatgttgtatgtatgtgcctcgcctggatcaccgggatgagccaggattggacttcaccattctatattatataaaaaccatgaaaccacttactaactactcactaaaaaaagactaaaacataaaaaataaaaaagcgtcatcgttacattccaattgcgcgtcctttcgcaagcagggatgtacagccctattgacggccaacttcctaaatatgacacagaacaccccaaatacgacctggagaaaataatcagagcaaatcaaggagctttgccgaggtgacattcacacccacatgccccttcattcggtacatccaatagggaacatctttcaactatgcgggggaggctgtaattgggtttgtattttctccgggtttctgcaaacgatctagaagatctaatcaaaaaattatgctcgaatatcttcaatttatcatacattataaggtggtcataatctatattttcatagagatttactatgcgatgaacatgccactaagttgacacgtcctaatcatcgtccgtctacgtttacttttagtcttaacatctcactcaatagataaatataaccttcgaagcgtctcagatctggcaggggtattataaatggattaaatagcataatccggagcgtctagatacaaatgcatacacatctcggtccctgcactatctactcgcgaagccgaagcgcaacaacctgcccaccataagagacacccccctggtcacctccacgagtagtaacataagccaatttcccacccggcacgatctgcacagaagtagggccaataaaagccaagctatcacccccaccagcaacgacactctgcgttccatccggcgtgatcttagcaatggcattagacggctgcgccacataagcattaccactagcatcaatcgcaaaatcatcccaatccgaatccgtatcgccggcctcgcgcaccaactgcgcaatgacctgaatacgaccgaaagtccccccgtcttcgctgacagccacccgggcgaatatattaagcgcactattggtgaagtacacattacctccgacaacctgcagaccattgatgccgatgggcatggacgagttcgcaggcgcggccagggcgtcgttcttcaacacaaccttcgagacaccggtagtgatgtcgacgcggaatatggatcccaaccgcgcgtccgcgatcaggagaatatgcggctgcgacggcattgaggccatgccgtttagcatatcggcgtccgggatgtgcgcgacggtctggatggtggggtttgtggcattcttgctaaagtcgacagtgtagatggtttcgttgtcgtagtggtatgagccccggactccgcctacgacggcatacttgtcgtggccgacggctgcaatgccggttagagctgtggcgccggggagcgcggcgactagctcggcttggggattgcgggcgagcgggttgattgtgtagagatgggcttcgtagaatgttgtgaggaggagatggccgttgggccggagctggctgttttcgatgttgattgagctggtgaagttgaatagttgggttgtcaattgggcggctgtggcgctggccaccatggccaggctcaatgtaggattgaaacgcatggtacagaataatttagagaaattataggaatgggatttcaactaacaaagaggggtttttatctacattgttgtggaaggactttagctctgagggatcaagtgggttcggcacggagcgcagaagtggtacgagtcggagatgacaagagatcgacgaagtagccaagacgggaaattgtccatttgaggctttaacaggaaatcagcaccgagctatggaaaaattatgttttggattaatgaggtgataatgggtgtggataatgacgctgtgtcttttctaacattcactactatgcaatgtcctagttctagagaccattgttttcgttcgactatgttcgagtatgtttttagctgccctacagaccactgaatatagcgcattgaggggagaataactagctacctgttgtggaactacggagctacggagttgaccttcaacattttgaaaagtataagaacaagccacacttctgttgaatttcccgctcaatgcggagtagacaaatacaacactgtaatccacacgatagactaaccaaactgacttgtagtccgttaaatgtcatcttatgtactccgtgctccggcacttgtactaactcgggcgagcatccgattctcggccgatctagtcccagataataaatatgaagtctcgtgtgaaacttcataatctggtaaatcaggactagaaatatcatcaacccattgccttatgcataatcgggttggcgccggcactacccagtggagaacctgtatgggaggcatcaaggtcattgttggcaatgctttccacctctgcatccgactcgtcggtgtcgtcgcatcctgctatctaagagtccttatatataggctcagaggatggttttccttcatgatttgctaacaaccatcgaaaaatctctaacgaggcttcacgtaatgtatcctgcgttaaagaaggaggagtatttaactgagaaaagctggagttcatcggtgacacgttagactgatctgggtatggaatggtgggattatgaagccgaaaccctctcaagataggccagagtgtgcctcgagtatttcttatgtttttatgtccgtaaagcacagttcttctcctttgtttgccctatcgggggccagggcgaaaatgagagactattgtagtgcagcccatcatcctccgtgacaggaagacataagagtctccagacattggctcttttgattgcatattccctaaactcgtcacaagcaaaatatggacctgatcctgcaaagtccataaaattctgtgcggaggatgtccacggaaacccactcggatctagaggaggcgttccacttttagcaaggtaaataacctttggaacaagtccactcagtgcagctcctactcaaagagcagaaaggctcggacggcgtattccgcacatcaaagtgatcaattcaactagggacctggtgcctctgctagttccgatctcgttggcaattcttccacaaccggatgcagccaagaactaacaaggttgcagggaaccccaggctcccaaaatgatccggaaagacttgacatcacgacgctagggttgcagcttagggccatataataggcaagatcatcaccaagggcaatatattcgttccccaatgccttatccgaaatgaattctaccctgccaagtacaatggttggagatggcaactcaatcctgcgtttgtaatgttgattcgtcggaaatgtcaacgctgctgcaaaagcgccaaaaaattgatctccaagaccatgcagtaggcaaaactcagacagggccatcaaggcctctccagaggaaagtggaaaacaatcggcgaattctggcgcagaagtccctatgccttgccatagaatttcgaatagttcatcctcgcctaagtcaatagaccaaggtgccaggtagacattatcgtttcttttggtcaagaccgctttccatccatgcttgggggcttgtatagccatccaccatcgagcaacgttgctttcggcttccccgatgtgaacttcaattggtggtgcacgctttacctcgtctctatccaccccatcgaccgcgcgagggtttgccgttgagctagtgtaaacaagctcggctccatcgtgcttttgaagttccaacaaacgggcggaaagaatataggaccaagcaagtgtgaggatacaatatagtttgaagaatatggcttagaagttcgccagtgatggaaggtgtctccggaaactgacaggtgattggctgaagctgctcgttgtttgagggcattgcgtagaggaggtacgtgagaattcgcaatattcggaatggtaaggctaaaggtaatgtacatgagttaacgaaatgttcgcaagaaatatgtcttcggatgttgtttaagtgatattgttctccttatcccttgcttggcagcatgcgtactatggtaaccggtttgacacagtattattttcaatttcaatttaacaaaattatgtttttggtcttcaacaaccaaaaagagtgtagtcaaatcaaaatactaaacatgatgagaagagaagagagaggagttgccctggtgcccggccatgcgtgaccaagcaagaacaaacaaagcaaacaataatacgctaattttattccacagctaattgcctatttaggcagggggtgtctcagatttcctttttcggtaggactcaggggtctagaccagcgtgttcaagctctttttgtggggagctatgtaatgtgataggctcccccacaaaagttcaatagactcttagaaaagagtatcccgcaaaacacaacatacgtgaccaaattatcccgcaactcatgccgtaaaatatgaccggtctatatcggattcatatccgtgtcaaataaaagctagcatcatgtaagagatttaatagtgcgcagataacatgctcaggttacggtatagcctccgtcaacgcggagatccgccccagtgacgtacttggaggcatcgctgagcaggaaggtcacagcacccatcaggtcctccggtgtacccatcttgccggcaggaatgagggagatccactggtcgcgaagcttggggttctcctcgaggatcttgcgagttctgaatgacgaagaaagacatcagcaacaatttcttccggaggtctgctcaaatgtatctcgtcgtccatgtaagagttactcacagagcagtgagcatatagccagggctaatgcagttaacacggatattatgactggcccactccacagcgagcgaagcagcaaggtggcgtacagcagccttcgcggcgttgtacggagcctggggctggggaacattaacgatagcgccggacatggagccgatcatgacgatgctcccgggcgccttccgctccatcaggtgcttagcaacattaatggcgaaaaggtatgtgccgtcgacattgacaccccacagcttctgcatacggtcgaaggggtagttgatggcctcgaagttctcggtgaagccggccgacgtgaccaggttatcgatcttgctgtgcttggccaggacttcggccatcgcattgctcacagagtcggggttagcgacgtcggcataatgggcggtgaccttgggcatactgtttggaattagccactgcggcgagctggaatggtatgataataaactgactcttccacaccgggattctccttgtggaactgctcgatcaatgaggcaactgcggcctcggcttcgtcctctggggtatgtgttaggataagtcgcttgttccggttatctgtagtggtcgtaggaacttactattaagatcaatgatggccaaatccgagccggaagcaacgaggccttggcccatgactagacccaagccacgagcaccaccagtcaccacgctgactttcttctcaagtgagaactgggccaaagtacgcttgaaatgcatgccaccgcgtccctgagccacgggctgagtgggcatctcgttgtcgggagggtattcgatttgtacgctttcatcagtgcgagcaaatctgccctccttatcactagcagcaccctcgggagccttatttgtagcagagaggatggggtcttttgcagggtcatcgctcttcttctttcccagtgaggcggtgtatgagagaggacgtgtgaggcccatcgctggacgggcggctgctaatacaggacgggcggccttgatggcatcgcgtgcgactgccggcttgaacattttgaaggttatagctccaatgcacaatagagctgtagaggtatacggttgggggggacgcgacgtataatgtacgggagaataatgttggggaggaaaaacggtctagacatccaggggaaggtggacgtatcaaacaaagcaggtcatcaggtcatcaggtcatcggacctcatttgcattttatttttctcagagcccaagggctaagaattgagacacttgcggtgaaaaaaagccaaaggatatcggagggctattgactgcctattttagtctcaagctttgttttatttgtttatttactccaattgtagctctaaagaatatagaaagctagatgggagactatgatgtcaccaatttagtacttttgtttactattattattcaagtactacgtatgctctctaatgttattctcattcaaatcccttagaacttgatcataacgatggaagagctacacggacttttgcctatttgctaaaaccagtcagtttcgtttcggccgcattttaccgcacgccaatgaagtgcttggatgcagctttcggattatcatctgatatacgtagggtgcagctttttctctcactatcctccgagcctaaaatgttgttttcgattctctgtaattgtaaggcgaaatcgaaattgatagtgtgaactccatatttgtgttaattttgggaggtatccccatgctgaaacttgtacctctataacaaaagtctcgctctattcggattcggcgaattccaccagcggtgttccgcttttgcattgatcctgcaaggcacatgttggtcagctgttctcgagtcacatttctctgggggttttggagttcaagggggtgaattaaaaacgctaaacatattcaaacgaaacaaaaaagatgtcatgggggtccaggaaagtccaggaaagtctggtcaggggaaaggcgcatgacttactcctcttttgtgcacgacccgtgcaatggttccccgttggggactgcgaatcaccgtctccatcttcatgctctcgatgacaaccaacggctggtctttctccaccacatctcccgcctgcacctccacccgcagcactttacacggcatcggggccaggacgctgtttgtcacatccttcagtcccaatgccttctccatccacttagcccggggcaccgtgagtcggtactgagtcccacgctggaatgcgataatagtatcctcgtctcgaattactgttgtatctaaccgggtgtgcgggaaaaacgacgtgacaatgtgcgacgctggatccatgtggctcaccacctgctcgaaaactcgtccgccaacctccacgttgaatgtgtcatctgctgtctgctgtactcgcacactgaacgtggagccgtcggtagaccctgggccgccggtctcggtaaatgacaactgtcgctcttggtaactaggagtgaacccgaccgttgagcctgcaacccctgctgaggatcgtgcccctgacgtggcgtcgcgatgtagacatgccaatgcgacttgcgccagcacttcctcctcggtggtctttgggggaaagagctcgtcacggtgcttctcaatgtagccggtctcgacctcaccagcgatgaaatccgggctcttgcagatggcttttaggaactctatgttggtcacgggtcccgcgatctcatattcttccaaagcagcagctagcttgcggagagcctcctcacgggtttcaccgcgcacgataagcttggagatcatgggatcatagtgggccgagacatcgtctccttccacaaatcctgcgtcaatgcggatgtccttcgaagtagccggcgttcgcacatggagtaaacgccccgagtcagggataaatccctgttctgggttttcggcgtagattcgggcctcgatgccatggccactcttggcgatacgctcttccacttcttcttgcgtaaggggcagcttggctccttcagccaccagaatctgccagtggacaagatcctctccagtgaccatttcagtcacgggatgctcaacctggagacgggtgttcatttccataaaatagaaatcccccgagtcattatcaaaaatgaactccactgtaccggcaccttcgtagccgacagcctctgcagctgaccgtgcctttgcccagaggtcctttctagttgcatcagggagatgaggcgccggagattcctctagaaccttctggtgcctccgttgaatactgcaatctcgctctcctagtgcaacggagttaccatgcttgtcggcaaatacctgtacttcaatgtgccgcggtgtggtgatatacttctccaccagcacattatcatctccaaacgagctcatggcctctgacttagccgactcaagctgagcttgaaacaccgctttggaactggcgatacgcatgccctttccaccacctcctttgacggctttgatgagcactggatacgtgatcttgtccgcctgctcctcgagaaacgcagggtcttgattttggccatgatagcctgggacgcatggtacaccagcagctgtcataatctctttggaacgactggtaggacacgcctggtaagcatagtgaatattcaaataatgcaatgagcgtacctcttatcacccatatcctcaatggccttatacggtgggccgatgaagaccaacccggcctcggtacatttttgcgcaaatgcagagttctcactcaactgcataacaagctcaagttagtattccatctagaatgtaaatatgcacagccgacttacaaagccatagccagggtggatcgcttgacacccttctctctttgcaatctcaataattctatcaccatcgaggtacgccgaaaccgagcccaaattaaaggcgaagggggagctcaaggcatgttgtgatcggctgtccgggtcggtgtagagtgttgttacgcggatcccacgttccgcggcagtgcgtccaactcgtctagcatatcgaagttagcaccagaaattgcacatgattcagtgcccaacatacaaggcaatttctcctcgattggctataagaattgaatctaacgatttgattgtatttggtgtgttagtggtcgatgatacagctcgcgatgttccgcgagtcgcggtcggggttaagcggggaacaatgcggagaagggatgagagggtcatgacgatgggagaacagccttttcagctgtaataaggccttttcagagcgtaattcaaatcacaatgtaagcataatcaaggtgctttgaagggacaaagtagagaatgggaaaatgtcaaggatttggagaagctcctgttgagccgatgcaaagcgagattgcggggaaagccgagggtataacataatcagccgtattgggagatgcatggatggtcacgaggcctcgtgggtcttccacccagtactagtactagtagatatctgaaaaggtccttcatagctgatcgagtgaataaaaaacaccgtagctgctcatcaagtgaagaaagagtgatactaccatattgttgactaccccatggggaaactggggattccggggtggatcacgtgagactcatatacccgctgggtattggaaaatacccctccgtaccttctcccagttctcctcattactcccggcttcaacattacgcttcacccttgtcaaatggttcctccgaacagtgattttatcttatggtttagtggacttcctatctcggctcccgtggtgccaactaacaagttccacgcttcaaattatctatcgagccaaatctcccaaacttggtaaagtgaaaatatgactgcgataagccttccgattacatatcgggagatacaaccttaaaaccttggaataacggcggcaaatctatctcttatcctataagggtatggaataaagcaagcccacgaggcgaccttgattgccagctcataccttgtaatcatggtgatatgtcccggacagaccttcccagataggaatggtgcctgttaactacatataggtatgttgtgcgaatacgatgatgcgtttccctcccttctgtttatcctatgttattcagggaccgctggggaacccagacagtcgaatcacggtcgctttacaggataaggtcaaaattatataacatctgttaagcttgtattcatgctgtcaggtatatagtaattatattaactttgcgccactgcgaaggcctaacctagagcttattgatgcaatgtagcaatatacatcagtatcagccaaaatgatgagataaaattgcggcagttcgaagaaaaagaactaccactacagaatagtgggtttcagctgtattttgctaagcgtcgtggcttaaaagattttgctgactcctctccctcgatcttgggcttcaaactcagccccgccatcctttaaccacatcgcatctcccctgcagattgtttgcttgcaaaacatcattttcgggaaagcccagtatccactggatcataaatcttcaaaaatggaagacccagaccggaaaatgggtaaaagtacaaagatgaccaacaaactggcggcgaagctagcgaaatggagaaagaaggagaaacccgatagaacacgtggaggtgcccttgtcgtctctccgaccgcagagtcaaacacgtccgagccttctatggtaaactatgtacagccttcagatggccttactggaaatcccgacaagctctccaaacctgctttggtgacttccaataccatgccggtctcaagtcttttcgagcccctctcgctggaaacgaccgacgtgcagcccgaaaatttcatacccggtccatcatcttctcctacgaccgaagacacctgggcccgggcatataaactcttgcaggctcgagagcccgagttggtaaaagattatcagactcatttgagcctagcgcaacccgagaactcagagcacataaatctctcaaatccacactcagttgagcgggtgataaagcagctgctggaagttcgggaccagaagcagtggcgagtctcactagtgggaaaggaggtgaagatacgagagcaagccgaaaaactagttaagtttctcctctgggccgaaccagccgtgaagaaagccgttagcacccagccatatgcagcattggcgtgggctggcgtttcgctgctcttacctgtaagccaagcaatcctcctattatctagccaaggctgacccagacagcttctcacaagcagtaccactagcaatcttgcgatgcttgaaggcttcgattccattgatcatgttcagatctactgggatatctgcgagaagacatacttgcagtccaaggatggggaagagtatcaagctctcatccaaccccttgctaaggtctactcttttatactcgaataccaagcacgtgctatctgtcatttctcaaaagctcaagtctctcgcgcatgggagaacatgacgggtgaaagcaattggggaaaaataagattaacaatcgaacaattgagcgataactgtaggagctatgtctcccccctcaaacttggggaggttcgccgtcatcgagatcgtcaattactggagattaaagagtctcgggttattcttgatggcattttggatgtcctaaaagcggacacgagtcggaaccagaagaattataaagaccagaacgagcgagggtttcttcaagcacttgcgtccgactacgaggatggcaagaattataacccactgagaatcccagggacatgcgattggttcttacagggtgacgtacttcgaaactggcgggataacgaccgctccagtcttctgtggatttccgctgggcctggctgtggaaagtcggtgttgtcacgggctctcattgacgagaatcggctttctacgaatatttcgacatctactgtctgctatttctttttcaaagatggggatgagcgccgcgtgtcagccactgatgctttgtgcgcattgcttcaccaacttttcacccacgattcgacgggcacactgatccaaaatgcaatgcccagccacaaaaatcacggcccaaatctagtacagaacttctctgagctgtggcgtctgttcatccaatgcgtcagctcgccagaggttggagagatagtttgtgtccttgatgccctggatgaatgcaatgatcatagcagtcggcaattgatccgcaaactaagggagctttactccgagccccaagtttcatctttaacctcgaaactgaagtttctgatcactggtcgcccttatgatcacctggaggcatcgttccaagatttccctgatacaacaacttgtgtgcgcttggacggagatgaaaagaccgccgaaatcagcaacgatatagatctggtcatcgatgctagactacaaaacctcgcccaaaacctcctagagagcgaccgtcaaatgatttcagatcaactcaagagcatggagaatcgtacttacctctggctacatctcactttcgatattattgagcatagccggagtgagtatggtcgactgtccgatatgaaagaactattctctgggctgccttctaaggtctcagaagcgtatgagaagattctggatcggagcggggaaaagctccagacagaaaatctccttcaaattgtcttagctgcatcacgacctctatcacttgacgaagccaacatagccttaacgatggctttgagaaagggcacttttagttcttacgacgatctccagaaagattcttggccgagagataacttcaaaggcgttgtggaaaatctttgcggtctcttcatcaatgtgtacgattctaagttgttttttatccatcagacagccagagattttctcatcaaccctcctcggagtggaaagtggaaggggcggctgagtatgcaacattcacacgcgaacatggcgctgttgtgtctatcattcttgtcgtttctagatgggcaatcatcagtggagcaaatcgaggcaaagtttccgttggcgcggtactcggcccagcattggatggatcatgcacggcctgcggagacagagaacgaagtccagaaaagcgtcatggagtttttccttcaagaaaatcaagcttggggtgagctctttgagtcgatttattaccggcggtcatatggacgaccccacatcctggcaactccactatactacgcatcgtccttcggtctccaacaaacagcacaactcctattggctaaaggcgcggatgtcaacgcgcagattgacaattatggaagtgcactccaggcggcttctgatagaggttacatagagattgtggagctactgttagcccatggcgcggaaatcaacgcacagggtggcatttacggaaatgcactcgaggcggcttcctctggcggccataaagagatcatggggctactattagccaatggcgcgggggtcaatacgcagggctcttatggaagcgcactccaggcggcttccgttagtggtcatacagagattgcggagctgctattagccaatggtgcggagaccaatacgcagggcggcttttatgggagcgtactccaggcggcttccgttaatggtcatacagagattgcggagctgctattagccaatggtgcggatatcaggacgcagggtggcttatatggaggtgcactccaggcggcttcctctaatggtcataaagagatggtcgagctgctattagccaatggcgcggagatcgatgtcaacgctcagggcggcttagatggaaatgcactccaggcggcctccgctaatggtcataaagagattgtggagctgctattagctcatggcgcagagattaatacacagggtggcttttatggaagtgcactccaggcggcttctgcttgcggtcacaaagaggtcgtggagcttctattagctaagggcgcggagatcaacgcgcagggaggcttatatggaagttcattccaggcggcttccgcttgcggtcacaaagaggttgtggagctactattagccaagggcgcggagatcaacgcgtagagcagcaattatggaagtgcactttgttgaaatccatactggctttccaatacgtacggcggttcaatggcatatatattcctctcacttcttgtattatttggatctgccacattgaatgtagcgaggtttccaatgaaagccttcatgttgatttcgtctagcaatatgtgttggtgaagatatgggatatgggggttgttacagggacccctccctgcctgatttttcagtattcggcttaccgacctccacaccgactttgtgtcgaactccggtagatacctacagcatgtatataaaccactaacaaaactaagtcacttttatcacatcgtcaacaactaaactgcttcaaaaactactccaaaaactaccccaaaaactgctctagcatcatcaagggattaaaaaatgtaggcatgagataatatacacgttttttctgatcagaatgtagggttttttgacaaaagtgcagaatcaagtctagcaaaattgatggttgattagtaagacaggatactgaaaaatcagacaggaggccgaattagcaatggggtccttgtaacaatccccaagatattctactttgtgtaagcttggttctgaagcagatagggaaaactgaccgtgtctaagttgtcaacctagaagaggatacggaactctcatcatcggacgaggtacgaaggcgacatagacttatgtactgagcctcagtgctttcacctccgctttatacgctgcatgaacgatcgcaatccctcgtgttcgagccacaggctctagctgggctattgcggacatctacatagctctccttttatagatatggcggtatatatataatctgttcagcagaaatccgaatagtcctagtggtcgaggccattacattcaagacaaagggtaacgccaaggacctttatcgagaacagtacacgtctataggtctctatgctaggtgtattggaaaataccaaacaccatacctctctactttctttatcttacccccacgcttcaacctcatcaaactatggggtattagtagtctcggctcccgtccgtgatacaccaactgacgagtcttgggcttccaacttatctgccaagctaaccttaagcagatagaccaaaaggaagactgcgataagcatttagatcatattcgggagatataaagatcagtcgatctatctctcgtcctgcagggttgtggaatggtagtatagccacagctcacgggggcaatctcgattgccagctcatgccttagaaaggacagcaagcattcaaacttggacatgcggtcctataatgttaatgtgatctcggtgacaatcccgatgatatgccccggacagaccttcctggataggaataccttatctgggctgtagcgcattgcccatgtgagtcaatctaagccgagacgagtactttgcaactataactttagtttcaccgactattaaagaaagtgcttgggttcaatcatgtctttcacgctcgtagaccataattcttgtttttaaatttgaaacctaacagtaatttcaattaccttgtttgggttccggctatttcgtcaacatattatgcccatgatgaatcctttcagcgtgctgaagcaatatatctggaactcttcccaaacccccgtcaaggacatcaaggaagaggtattcgatccgaaagtatgtacatctagagaaatatcgacgcttaaccgaaagaccacctctaagttctcatcaaacaggtgcacctcaactacaccccaccttcaaaaagatttacaatgcaagaattgcttttaagccagagcccaaccgcatcgccaattgcaggaacagttccattcccattattgtctgccgagggtgtcaaagcctaccggagagcgctattccaaaagaatgtcatagacaaatgtgccagctcgccatttccggggactttagtcctccgcgacgcggtgaaacagtcaaagtttgtcaatgacttttggaggcaccccgagacaatgaggattgtgtctgaagcagtcggtgtacctctggaggtggtgatgccaacggaaatagggcacactaatatccaagttgaaggcactaccattgcagaaatggccagtaatctcaaagctgagccggcggtagaaaaactcgagttgagtctcgaagaccgaacttacgaccctttgaaagatgcaagtgccatcattccgtggcagtaagttcataccctggccgccttgcttgtagcactgacgagactaactggctcaaagctatgactcgtatccttacgtttgtgtattgatgctgagcgacactgagggtatgatcggaggcgagacatatatcaagaagggagacggggaagtacagaaggtgtgtaagaaatatacttactgaaactaaaattcctctgctaaccaagccattgaaggttgagggcccccaaattgggcatgctgtcatgcttcaaggcggcgaagtctgtcatctggctgcccgggcgaaaggcgtcaaggagcgcatatcgactattacttcataccgttctacaatgccaaacgtttacgactccagctatattaccaacgtccgcccttatgcggatacaacctctctctatcctgaatggacacaataccgcttgcgaaaattaagggacgagctcacccattatcttgacgagatggagaaagacgaagagcctgccaaagagagaaaggatatacaaagccttatagaccagcagattgattatttacgacgaacctctcgacagatggttgaacctgagtatactcagcgagttttgagaaactatggcaggccgtcatactacgatgcacctagaatctgggagactgttcaatcactaccgggatttgagagacttgcatcagcggcggacgaggaacgacgttggcagcctgagagtatctattggaaagacctcatgagatccacggaaacaattcgcttagggaaaccccttcagagctctcttgggactgctgtgcgggagaagacaagaaagtactatatgggagatgaacttctgcgacaaggactcaatgaggcgttcttggattggttgggatactcaggtatttgggaactttactgcaacatttgattggaagacatcacgagatccgaaatttatgactacgactagttattacattacacaaatatattcgaacaagacacatctcctattgcacgccaagataaggatcagtcgtatgaagattgtctgtctgtagtacatagtatactgcaatatctgcaatacatcaagaatcaaaatgatattcgtaatttgattgtgttgggtcactggacagcccagaagagaggtgccatgccctcccccggcctgtccagcaacaactatataaataagcccttgagttagccactgaacagtccgaaagagaggtgccatgccctccctcggactacccagcaacaccaccctccatacattgaagttcagtttccatcatccaatacaacaagtataactcaatattcatctcctccgacatcaattcgaggcctcgttaaaaccagctggaagaaaaccccgtgggataaatacaaccagctggaaagagtgcctcgtacatatattgaatccaatttccgctcgtttcctttgttttcccttgaatttcctcccttgttttgttgtctttcgatatcgttttttttttaatttttgatttttgattgaatggattgcccaaagtcgtttggtttgttggttgtgccggttgttcgttggtttttgtcgattttggatatttatgttggcggtatgatattggtgttgatattgatatggttgatattgttttcggtgttgttgatattcaaatgattgtccgattggatgtttttctttcgtccgatgggcagttgagtccttctgtttgactcattgggtggtatgggttgccatgcccgttctcttcttcggagtcggttcaatggtaaaatggtggcatggcaacccatacaaatcttcttattcggggttcgttcgatgaatgggcaatcaattgagtccttttgttcctcgggactcatcgggtggcacggttgccacgcccattttcttcttcaggttcgaccggtgcgatttccaacatttttttacatttccagacggcagtgtcgagacattgtcaagagattgtcttgagctgtcgtagagctgaggcctcatcaaaaccaaccaggagaaaaacccgcatggggaaagcttcctagctggaaagagtgcctcaagtggttgtgtattgtagtaacaatttggtgtcaatgacaccgtggtgaatgcccaaccgggagaaaaccacgtgggaaaagctcccggttgaacgtgaagtgttcaccaagaatgttcaatatagttgcccgtcctatgggaaaaaccgccgatatggatggggatgagagagacttctatggacgttcaatgaaccagttccacacgatgtccacttcagctgcgggattttttctatacattaaagtctcaaaaatagaaatagtatcagtcaccaggagatttttagagcccaagttatctgtcccaaatgaggaccacaggcgccgcagtcctcacccagtacatcaacccgggtatcaagaatgcgaatgctcgatgtttggatagagacccgggccctagatctctccccaaacacggcaaagatgagagagagttagaatccaagttatcagccaccagcaaagaccacaggcgccgcagtcttcgctgaggacatcaaacccagatattgcaagttgcggatgcttagcacttgaataaaggctagggcccttaacccctacccaagcactaaggtgacgaggctttcaaaattcaaagcacacaggtagtttctcccagaataattcagtggatttgttaaattcaatgctcttcaacaggtgggagtcccaactgggacgaataacggggggcccgtcgtagcacaccgtgtgggatggttgtagaagaaaagaaaaaaagcagaggggagaggggaaggactgatatatatagcttagtgtgacgtaaacctcgatagtgtccgatatccaatcaagtaatcgacgtacgtcctgtgaaatgaaagtttagatgtccggtccgcatgagggaagtgtatatcgtacaaagacatagtacttctggtccattgaatgggctagtacatttgagaatatcacctgaacacttgcgacaccgtaaatggaaagcggacgaagttatttgatgactgaatcctaaaaatcacttgcatttttggtataatagctggccgctgttgtatacagaacggaaggcgaagtcaaaagtgcatacagaccacactgccatctcatgtgagaaaagctaaagaaaacccaaaagcaagtctagaacgaaacaaaaacaaagaagagaagcatgtctttacgaaaagctgcattgatgccttgtttccaggccgtgaactgcctgtgacgatcagggcacttgcccttcctgatcttcgactgccgtgctcgtactcactgaaataggaaggaacaatgggacagagtcgttccttcgcgattcagtaagcgaggtcacataaaacccagtcgcgagaacgcgcacgtagttttccttgttctttcttcctctgtacttagaattctgaatccaatgcaatcttttcccttggattgaattggcatgtcacactgccctactctcttagattacgtatttagcagagtccatatcctctactctacacatatttcaaggggattgttacagctcattgctgactcgaccccattagcaagacggtagatacctacaatttgtatataaaccactgacaaaattaagtcactttatcatatcaactacttcatcgtcaacaactttttcaacaactgttctatcatcatcaagggaaacatgtaggtatgagataaagtacacgttttttctgatcaaattgcagggttttcataactatctggtagatttaaagtgatgccttctatgtaggatagaataaggcagaatcaggcagagggtcgaattagcaatgagggaattccctgtaactaacaatcccctatttcaatactcattgaacaaaaaccactttctccgtcttcgtcgtcttctacgtattcaagactctccctctcaaagacagaacgcaacacagagcctatgttgtatagggtaaatgcgatgtagatctggagaaacgccaaggcttatgttagcaggattgctatctccttcaatgcacgatcagttcgatcttccctccatcacgtcagccgtgcatcctcgttttgcgtgtgctctacatatctgtacttgacttacgttcgttgaagtcttgtcattcatttaaccagcgccccctcgaaaccctcgccactcgatccccttcaactttttttccggtatccactacgagatgtccgacgacgatgagtactatgaatttgaggacgaatacatgtacgaggatttagtcccagacatggtcgtaagttcaatctaaaacacctcgtccgactctgccatcagtgctgcgcgagaaaaacagcgtcaattcagaccttaaccaaaaatttgcttatctaggacgacctcgccgcttcctcacactacgaagccgcgctatatgaagacccagggatcgacgtcgaagaatacttcagtgactgggactattattcagacgattaccacgatgatgacgcaacggtcgaacaaagcgcagagagaaagaaaagaaccgagatcgcagcgacaacatcacgacgaacgaagacaccttcccgcccaaaaggccacatcgcccgaatcccgccgacgaaatccaccctgatgccggatgtcgcctccttccagggcgtggtgtggaaaacacccgcgctggaccgggaccaggatgtcgccattttgtacgaaccggacacgggcgagaaagtcgcgcttctagagaactggcgggaagtcttcaaattttcccagccggcactggataggtcgcggttgaaagggcgacacgtggttgaatctaagcccgtcgattcgtcgctagctgacgatgaatctgatggcgcggacgacgagtctgatagcgaggacgagatgtcggatgatgtctcgtcgaatgcctcgggtgttgatgatggggatgctggggatgcgtcgaatacaacttcggacccggacccggactctttccgctcgctgaaactgtcttcgccgccgaaggtcgtgattccgttgaagagggggtggaagcggaaggcggttgcgctgaaggatgacactgacgatcaatcggcgttgcctccacagaagagggttgaggtgcggaagggcggtgatgacagggctacaaagtgtggtgcgacaccgccgatacgcaggtcgaccaggcagaagaactaggacggtcatgttaataatttcggatgtatggctatttacaacatgtacaataaatgaaatgaatctgcatatagtcttctaaagagatggcattgcccaaatgataatttgtgtataattctcttgcttaagcatactccttgttgaatgcgcggccaatgaccattctgcggatctcgcttgtaccagcgccaatctcatacagcttcgcatcccggagaaggcgcccagcaggaatctcgttgatatagccggttcctcccatgagttggatggcatcgagcgtgcattcagtcgcacgttcggcggcgtagaggattgcaccggcgcagtcatgagtgcgcacggccatctcgctaggttccacggcggcgttgtctacatgccgtgccgtaacatatgtgtacgcacgcgaggcagccagcttagtgtacatgtccgctagcttgccctggaccagctggttgtgggcgatcggtgcaccgaattgcttgcgcacgtgtgtgtaaggaaggacgaggtcaagcgcagcttgcatgattctggggagtgttagaatacgagagttgtgctggggtattggatggctcaccctaatggtcctgcactcaggacgagtcgctccaagtccagaccctccatcaagacgcggacaccgcgatttaactcacccaggacgttctcccggggaacgaaaacatcctcaaagatgagttcgcctgtgttagagccacgcatacccaacttgtctagcttgcgtgcgcatgagaagcccttgaaggtcttctcaactatgaatgctgtgatacctttggagcctagttcaggcgctgtcttagcgtacacgacaatgtaatcggcatcggggccctgtaagaaggtgtgagcaatgtgatcggaacttcgaagcccctctatatccccaaattacttacgttcgtaatccacatcttagttccattcaagagccagcctccatcaacttccttcgccgtggtcttcatgctgactacatcggagccagctgaatgctccgacatggcaagagcaccgaccttctcgcctgataggagaccgggaagaatgcgctctttttgttccgtcgagccattgagggagagctggttcacacagagctgggagtgggcggcataagagagaccgatgcttccttttatccagaatcgaggtcagatcaatgttcccctcagccatatactggaagacataccggatgctcgactgatctcctccatcaccacgcagtgtgcctggtagcccatacccaggccaccgtactcctcgtccgctgtgacaccgaggaaccttgatatatgttagtatgcgctgtataacacactcccttcacaaagaagagagtcaaccatttgagagaaccatacccagcatcacccatcttcttccacatttccgctgggaactcattctgttcatctgtccgtgcagcaacatcggctgggatctcacgccctacagcaaggttagaagtgcgacttgggttagagcatagataatgtacttgtgaaatcttgcacgcgctcccgcagctctaggagatcactctcggacggaggtacaaagcccgtggggtgttttgttgagatagagcggaaatacggggtaagtgcggggatgcgggttagccgtaccgcgcgtgttgaggtgcgaaggagagggagggttagggacgccatggttatatgagaaaatgtagaatgcaaattccggggaagaagtgtctttggggaagtggaccttttaaagatgtgtgtgcaagggggatcggtagttcctcggcgcattcaggctcagacacttgttatactatgagtttcccaccttgtaacgagtgatgcttttggatttcagatactagaacctctctataagctccttgatttcaaactaattcgttcttctattctatgctctctctccctcaccaattgctcagcatctttctgttgtttctcagcattctcatggccctcgggtatatgcggcaattgtcgcatctccgcatttgaggcgaccccagctttgtggcccgctttgtgccttttcgcttctctcctgctgtttcctgttcgtatgtctttgaatactccggggaactcctaatatacctataattccctcttcagtttgacttgggctgagctctgccatcctcttctcagaatcagctactccacacttttccccgcaatgcgtgtcccgtccccgctcgtcctccaaacctggggttgccgactcggaccacggaaatgtctcaactcattccgccagtcaacaaacattacacgaccagcttatagaacagtagcaagttatacacatcctcaccatgcctcagccctctcagtcctccccacagcagtggacacctcctcacaggagtaccgcgaaaacagcgaacaaatgcaaaaactcctcgaccagatgaacagtctacacacaaaaattgcacgcggaggaaatgacaaagcgcgcgagaagcacatcgcccgcggcaaaatgctcccaagagaccggatctccgccctagtcgacccaggcacctccttcctagagctatccgcactcgcgggacacggtgtctacagcgaggatgttccagcgggcgggatcatcaccggaattgggatggtcgagggtgtcaactgcatgatcgttgctaacgacagcaccgtcaagggcggcacctactaccccgtcacagtgaagaagcacctccgcgcacaggcgattgcgcaggagaaccgcctcccctgtatttacctcgttgactctggtggtgcaaacctgcctcatcaggcagatgtgttcccagaccgcgatcacttcggccggatcttcttcaaccaggcccgcatgagcgccctcggtatcccacagctctccgttgtcatgggtccctgcacggccggtggtgcatacgtgcctgccatgagcgacgagaccatcatcgtcgagaaccagggtactatcttcctagcaggcccgcctctcgtcaaggccgcgacgggcgaggaggtttccgccgaggacctgggtggcggtcagctgcattcgagcatctccggtgttaccgactacctggctgtcgacgatgcccacgctctagtccttgctcgccgctccgtcgcgaacctcaactaccctatcacgcccactccgctccggctggaaaacggcaatggagattcgcatgtcgtgaaagaaccgctatacgaccctaatgagctaaacggaatcgttggcaccaatctccgacgccagatccctgtccacgaggtcatcgcgcggattgtcgatgggagtgaattcgccgagttcaagcgcgactatggctcgaccctggtaacgggctttgcccgcatccacggccaccgtgtcggcatagttgctaataatggaatcttgttctccgagtcctcgctgaagggagcgcactttattgagctttgcgctcagcggcggatcccgcttgtcttcttgcagaatatctccggttttatggtcggcgctgatgccgagaagggcggcatcgcgaagaacggtgctaagcttgtcactgcggtcgcgtgtgccgatgtccccaagttcactgttgtatttgggtccagtgctggtgctggtaattacgggatgtggtatgtttctttctttctccttaggctttctgtagtagttcttctctaactgatattgctctagtggtcgtgcctactcacctcgtcttctctttatgtggcctaatgcgaagatcggcgttatgggctctgaacaactctcggccgttatggaggctgttggacgaaccgctgatccggctttgaaagaccgcatcgaccgtgaatctgaagcgacgttttcctcggctcgtttgtgggatgatggtatcatcccgccgtctgagacgaggaaaatgctggggttgggtctgacagctgcgctcggtggcaaggctgagccggatgtgcagaccaggtttggtgtcttccggatgtagggttggatcgaggcatggtcatttttattcaaataattcgagaaaatatagaatagaagacatctgtttatgtgccgttaacttgttacgacggttccggatagtcaaatggaatatgcggtggacagtcgctttgtatcaaattatgtagccttggcctctatagactatcgttctttagtctagtggacttctagaattgcacggcgcggtccaaagagcgcatcaaaggaaagtgtttgaatcgcacaagatatccggtactataatttcactcctttatgttgacggcgaagggtccaaccacaaggattgtagcgtgagcctatcaaccaaacgataatagcaacaggaccaaaagaaaagaaagcacttttttccatctcttgaaagtagtctttttagagtccagagcaaccaagcctcaatcaaatatgtcaaataataaaaagaagtatgacaccaattgtgtacagcgcaaaaaaaaaaagaaaaaaagaaaagatacaaatctgtagctgcgaagcatggttctataggggtgaggagaggagaggcatagacatatcggcagcatatagaaagaacatcagtcatacatgacatgtcaaaatgcatagcggcgtcgaataggcatagatcgcagagggtcgtatcgcatgaaaatgaaacaagacaaggggcctcggcgccccttgaattgctaaatcaaaggatgacacacggaccgcggcggtttttcggccggcgattgtctcgcttgcggttcgggccttcgcgctttcggttgggatcgttgctgctctttgcggcctcggagtctttgcggatgatctggcggcacagatcaacgaagacttcgttgacgtttgcgcggcgccgggcagaggtctcgtagtatggtgcgttaccccatttctgggatagaccgaaggcgcgagcgcgtggtacagcgcgatcttcttctaggtcggatttgttgcccacgatcacaattgggacgttctcgtcgtctttgattcggatgatttgttcgcggagctcggagagttcgtttagggaggacatgctcgtgatggagaaaacgaggaggaatccttgaccttgtttcatgtagagctctctatagacaatgttgttagtacggtgtgtttttcttggagttggttcgcagattggtgatggatggagtgtggctagatttacctcattgccgcttgtgggttgttagcttcgatctcacatgggtagatgtgccaaaaacttactgaactgttctgttcctgcggtgtcaagacttcgaaattttagcatcatgccatatccaaaccaccgaggtactcacatctccagtatacattgtcgaccctatcgagcatggttaacggccgagtgatttccagcgcgtagtagacaacttacgtccacctcaatctgtttccggtatgaatcctcgatcgtagggtcgtagctttcaatccagacattttgaacgaattgggctagaaggcgattgttgctcagcttgaggactcagggcagggtgcggaacacagggaacgaacctgttagacaactttttccaacacctcctgttatcgcgtcgcatgggaatgcctgtggtcagcctatgacctatggaaacatctcaggaggaaaggctcctaccagcacccaacacaacaatgtggtattcgcgtctaagcgcaaacaaacaattagaattggatctagggacattcaaggagtatcatggagtatcatggactcactgtggccgcattgagaaaagtgtgtatcgatatttagtgattcggaatggaaatcgaaacagctctcgaggacgaaggtcaggctcaaggtggatcccacgtggtatagatggcgatctcaaatcgtagaacagttggctatgagaaattggcccataaaccacgttgaatgcttcaattgtattgtgtagctcccttgggggtggaagagctcaggagggcggtacgcgggtgtggttacatggcccgcctttgcgtagacgggggatatggagattcgagtggttcgagggattggagggtccactggagaaatatcaagacatataaagtaaggtaaaggtatttaggcgtttctgcatgaatttttttaggggaggggagaaggtctgataacgggagttatcctaattgcatctcctgtcccttcgacccaatcacaccatatgccgaggtcgtctctggcggtcaggcgctaactgtaagtgtatgtatgctgtcggtcttttcagaatgtttgctcctttcttttggggtcttcttggtcttttttttatcttttctttcccgattgcaactgctatccctgtgaatatggatcacgtgactcccctgatatgccgtcccagggtcatttgtgtttgaagatactcagaatcggtcatttttctaaattttcagattgatacctcatgtttgagaaaggaagagtgtgtggaaatagggcaatgtttctcaattggtcagttttgataggcgggatctcgggggaagcagaaggatgcatcacatacgaccaactactgcaggggaggcccacaaagggactctccccggtttcatgatggaagaaaaaaagaaagattagaaacgcaaacaggtcaacgggtaaacaagttatttggtatagccctcgatgatcttgggaaaagccgcgtacgtcatgtcgtataggatgtacgatctcgggagatttgtggaggggccaacggactggctctgatacattatactccagatgttcgatttgaaatctgttttaaggtacatcgatacatagggctatcactgctgaagcttaaactcgctacaggccactaatatattccccttagcccctcaattaggcactctagcagacggcatttatgaagatagaagtagtatccatagtcatctgcacgatctccaggtgtagatcttctgatcatatcgatatactccttatatcaagccaatagccttggaacaatttactttgtccagcttcataagtggatggatacgtcatgtctatcacgtgatgagcacaggctagccagcctctgtcctctttgccgccgtcttgaccggttgcattctcaccatccctcactccgttctcatcctattagctttctgacttgttttcccacaaacgatacccttataagcaaaaatggcctctttccaggaacgtgcccagcactctattgctcagctcgacaaggaggtacgtttccagccattgttgtgtgtttcgctgtcctcctaggtcaaaccctcgcctggtggctgcaatgcccctaagcgatagtgaccacagcaggagtatctgcaatcacatcctttgatacatacttcactatagtatctatcgctgtggttttgagctaacatctgctatttcgtagctctccaagtaccctgtccttgccaaccttgagcgtcagaccaatgtccccaaggtctatgttatccttggccttatcggaatctacttcttccttgtcttctttaacattgctggcgagttcctcgtcaactttgccggtttcctgatccccggttactactcccttaacgcacttttcacctcaagcactcaggatgacacccaggtgagttttttttttgtaaatttccccctttacacacaaattactaaccttgtcttttttcgctcctctagtggctcacggtatgttcacatgattttatcacctggttgttacaatcgtgcggaagtaatcaccgccgattgttatcatacaccacccacgtgacatatttcccgcttgcacgcgatcagtaattctaacatatgacttgatagtactgggttgtgtttgctttcctgactgtcattgagagtgccatcagcgctgcttactggttccgtacgtgcccacaatatgccgattttctgactatcttgctaactgatcgcagccttctactacatcttcaagttcgttctgatcatgtggatggcccttccccagaccaggtatgttactattccatgaccaagttaagaccagtagctgatctcttttaagcggtgcccaaattgtcttcaactccttcctccagcccgtgcttggccgtttcttcagctccaacggcacttcctccaacctgcgcgctcaggccgaggctgcgagcaagccccactccacttaaaggtgtgtagtctcacatcttaaccgagaatcgcgtcgacaataaaagctccgcggaacctgcttaggcgcaggttgcggatccgattctctgtgcccaagcacaaagtggagtggttggctcaaatgttcgttgtcatgattaaataggggtagtgcaatagctggaacatgaaatagagaggacccgagcaatgttgcaacgggtccgaggttggatattcgctcaatgtgagaatgctatattggttcttgccattttgtcacactcgagtggattagttgttagttcgtacattatgaatgtggatgcagttggtttcatagatgtgttcgagatcgacgttatctacattatctacatgtatcttctcagtgttgccctacgcgccatcgagctgtgtccttacaaagccgtacgagtgaggatgcttgagtatccatggatagatcgaaggcttggagaagaccgtacataactttgtcagtagttgccatccaaaatatacatcttgactccaagaactcaactgatacacacatgtcatgcattagtattatctgcgcactctatcatctaatgacctccttaaaacgtcgtgcacaaccgtccccgcaaatacagggtgaacggatcaaccccaagaagctggtccgatagctgctagtaaatatcaacatcccaatcaaagcaagtgaacttaacaatgacaatttcttcacattgggaatgattgattttgtaaacgcccgttcgaagtcttgtactcttccccgggtcaatatactcaatcaaagcagtttgttatgtattctcaatactcgagccgtcatatctgcttctgttggatcaatgtgatgcttctttggtttgcattggggtattggcacactgcatgaaggggtagttgtatttggggctaaatatcgggtgttgatggatcagatggaatattattggctaagagatagcactttgcttacaatctgcaggcttttatgcaggatgcagctccacagaatgtgttttagaaaatattacttcaaaccaaataccatgacggtctcgttgaagacacgttgtacaccgagatcacaaacctctctggtttatgatgtctcgtgaggactcaacagaaggcctggaataggggtttcatattgatttgaaaaaggatccatatgtactttacgccgcattgtaaaaagaaccagcccagccctttcaagaatccaaaaatacataaacacctaagcactgaactccagatgaccaccacagcacagggggtttgtacactcatagtaataaccctttttataacatctgacagatttcgtaactcgtatcggggtcgatcgcccgcagccatgtttcaccgaaggaaacaaaagcaacgtgtccggttggttgaacaatgatcggagcgggaacgtattagaattgacgatttagaggtatctcgtccaagctcttagttaaacagcatatctcagtaaagccccatgcgatttccccagccatcagcccgcgggttgacgacaatccgatagggaaagggattggaatcgctagtggtgatgggcgggatatggtctttatctcgattgacaacgctcaggattttcaaagctgccttttgcagcatatttcccattgccttgcgcaccttggctcgttctgtaaccaaattagctctggataaaaaagggaccccgcagactgtacataccagactcagtacgcggtgtcgcgatcgtcacatcaagtgtccagatctcccagcacacctcttcctcgcctttccctgtcagtccaccaaaccagtgccccgaccgacgtcgtttcttctcgtagaactcgactgcgatccgccctcgcacacccccgcccccaccgacaatttggccatcctgcccgccggctgcggaggacagatgctgccggaccagagctgatatccgtgattcaatcagtgtttccaggtctgcatcgtttatagcggggagtgtgaagtcgagcacgtcaaaggtgactggacggatagaagggaaataacggtggaagaagatgaggttcaggacgcctagcaggaaaaacttagcacaaacgacatgattaatatgtctccctcacaactgacccttcagtacatctcgcacatgggtggtgtccgcgaagatctccagaaagtactccggaggggttttgcggggctccatccccgccatgacgcagctcacaaccaggccggttgagtgcagcctcaaacggttcctgctggtgaaagaggaagtattgtcaggaatacaaaatcgagggacagtcagtaaaaaagttgttgcatagagctggaggggtgtaaggtggagtgatgattccgaggccgatatggcaaggggggcgggtctgtatcggacgtagccgactgaagcttatcgcttatcatcgaactggggtgaaaccagcttcaaagaggacatctatgttcaaggagtacgaagtatacggagtagaagtataaagagcaatgagaagaggacaagaaagagacatacagggcttagcgggttattgcgggatggccatgccaaatccggagctctaagatacgatcattgatgatttagagaaatgagtgaagatggtcaaaagtttaaagctgtaagctattgcaggtattaaaatcctctgtggtgctttatagacgcggttcacttacattgcatgacggtgagctctagccgaggcctgaaactggcgatcagcgcccgaagccgctcttccccatctactccgtacttaaccatccatctcccaaatatatcatgacttgggatcgcctgtcattttaacttcttccagagaagcaccaaacacaaatatgatcggtgcgacgaggcgctggttccagcgcaatcgcaaaggtcttgcaatcggggctggggtgataggagctggctatttggccggacaatacctgctgtctaagatctccgaggcgcgggaacgcatgagcagcgatcggattgctcgcgagaagtcagttttccttgtttttgatgactcctattcctccgctagcaagcacgcgagcttgtagcacgtgaaagcccgaccagcataccccggaccggaatcactgacccatggcaatagtttgcgccgacgattcgaacaaaaccagaccgattgcacatataccgtcctcgcgttattgccgaccgccgccgagaatattatcgatgccctcccagttgaggagttgaccaaggaactccagcagaagcgagcggagaggttggctcggctgaatgcaggagaggcgactgggtcagatctgagctcggtttccccgagtctgccggacgaggatcggaggagcctctctagtttccagagtgaaggatatgtgcacgcaagccaggccggcgatgctctgaactcggacgcacaacctcggcccaaacgaaacaagacacagctgtggaatgaggtgaagattacctgtgagtctgtttcgttcatcataaaacctcatctgtcagaaattaacgtttcttagctatcacgcggtcttttactatgatctacactctctccctgctcactgtcttcactcacatccaactcaacctactcggacgccggaactacctgtccagcgtgatctcccttgctacaccacctgcgaacgtctcgacaatcagtcttgaagaccacgatgatgaactcactcagacattgggcgatgacttcgagaccaaccggcgttacctcgccttcagttggtggctgcttcaccgcgggtggaagggtataatgggaagagtgcaaactgccgtagaggaagtatttggacctttgaatccacgcgaagatatcagtttggccaagctctctgagttgaccttacaaatccgcaagaaggtggaaggcagcactgaggacgagcgacgatctcaaaaatggctttcttgcttgcttcccccggcagaggaagaggaacatgtcttgcgcgagtcgggcgtggaaggcgtagccgacccaacctcttcccagacggcatcgaagctgcgacacctcctggatgagacggcggatttgatcgactctccctctttctcccttgtcctcacacttcttaataacgagggattctcaactcttatcgatcaaagatgtgccgctgacgccttcaaggcgcccacctctgcaccggagactgccccgcagtccttcgattcaattgccactgttgtgcccctggctgccaactcagagcgcaagacaaagcttgccaatcttctggctgtcatgactcgccaagcacatgtgattggcaatggtgcccactcaccaaatgagtatctggtcgccatggaccagaacgtgcgtgagctcgaagccttctctgccgtggtctatagttcgaacttcgacctcgagcttcttggtgccaataatacagcggtaccgactagggagacagatcttgtcgatgccgaaagtgcttcatcgtctttctccgagatgatagttgagaaagaagacaaagcagatttaaaggaggatataaatgagtcacaatcacgcaatgccttgcccgaggagccagccttcaacgagcctgcgcctgagccgttggcagactcagcctttgaagaggcttggggcaaggccacagatgatgggagcatcttcccagcaggaggaaaccagcccgcacagtaatacgatgaagataaattcaatcctgatggcgattgtgtgattctctacaaccttactcccttgtttttcgcacatcgctgtgggtctggttttcatctccactgcatacattatctttgcgatagaattgtgttatgttaatgatatatgtcagttcaagtatctattcctagttagttctctcgaaaattcctactagcgcaatatagctgtgcatgttttctctacgttgattatcgaggtcctgaaccctacggtttagcgagcatgccattgtacaatcctataccccagatcaaagtggactagtgtgagtggagcggcggggggcttatgcttggggatagtggcgctgagacacccaaggcgaagtcttaaagagattatggagccatattaggtatctgcaaataacaagcttggaaagcaaaggatatgccagacatatgcgccaatcccgctagcctcgggactgcaaattgtgacatgcagatgtttttgcgtctacttagtataacagacatagttcatactacatactatgtcctatatcgcacctttttttccccactgtcacaatagtctctgtcctcgaccggtgccttgttctgaatgccaatgtacgatcaggcacaggtacttctcctttgtgtctctgtacaaacctggatacgctgaaacatcttgacgtcatgactatatattttcctttcgcagcttccgagctccaccaatgagctaatcaagcccacttcgtgtggcgcagctgtcttttatgtcgcgcaattgaaattttatcgtatttgactatacgggagatggactacacatgtattgaggtagtacgtttagggcctgattttcgccctattaaatataaggggttgaagcattgccttaactatgccctttctttcaagggatagtccaattatgcattaatacagccctgggagaatcaacccgtagctaacaagtactctggatggcggctatttggagttatttccctgtacgtggtactccgtaaaaattcccctaacgacgttttctcgcaaggaggtataccccgcagtgcgcacaggtgcaacatgcaccgtgcaagtatcagccataataggggccggggccgatgacagcgggctgatcattgggctgtatcgacctaaggggcttagatgatgcattagaagccaacacatcccataataaaggatattgtccctgaatttaggagtatatacggggcacggaatagcttatgcttatatgcaattaaatatccaggcaagcattatttgagcaatatagcacacgcggcagtccccactcatatggtcgttctgcctatcaaaaagggcttgatcttcgatattccctcacaagagagggctaggtctagtagcagatactcgaagttctgaaacgctggccagaattcaatcgtctctactagggacgacacgtgggccaagtacatctccatatcggttggtgaatccagcaagatggatgacacagtgggccatctagttcgatctgatcggcactaacattatgaaccagcatcatgtacttatcgcttgcacgagtggcagcagataagcacaacttgaagtctctcggggtccccgacactagctgccatgctgtcatttccaatttcccgcctaaactgagactataggacacagggcgcctgtaacggacatagcaggatatctgactgcagtctctgggacataggagaagacaagggcagtgtaaactggcattgtcgatagggtacttgttgcttcggagttaccggcggctggatggtggagccggctgatggctgtagcccctgttatgtatggtgtacgttgactgggaatctagaggcccatgactcgtaccatcatactaagcattttcgagaagactcgttagttagttatcctcagtgggaataaccaaggatcctgcgaatatgatgtcgctttcaagtgttcacatgctcaggggtaaatttgtagggatggcatgtcaacgtagcatttatccatgaggaaaagcctgttgtgaaagaaagacatttgacatgaagagctggagagagacaacaatttgaaacatcttgaactgtaaccatataccgtaaagtacccagcctcaggtgtggctgagctaagtactccacccgcaaaattgggtgggaaggtacttccaaggttcctccgccgtgttccgtatcgtccaatcaccttgctcgaccaaggaacggccggtcagagtcctcaaggattcccccgatgtgccctgtctctccttaagacctgcccatcccaaccattcctctgcattcgacatttattggcagactccagcactgatttgtgcttcttcgtaattcttcactatcactgcagtcaccgagatcgcaccgagatcacctcacgattgagttcaggactttgtgtcgtcaccctcgcctcaaaattaccccgaggatcaacccattgcacatctacaacgccttggtgccattacatatcgaaggcctttactctcagtcttccgcttaagacctcccaaaggggattgtggcggctgcatactgcagtgggcgctggggccgcattatctccctatccgccagccgcgcgcatcggaaacgcagcgtttcaagtcatcgtcacgaaccatcccacatcctgaagtaacagccagtgcacgtgcactcacgaccaaaccgaactcctaggacagcgacctcgcacattgggatattaaggccggtgtactatcccgcccaacatgactgactttcgaatgcccctccatcaagggcctcctactcggaagcccctctctggtgcccagcacgcgtatggtggatatcagtcctacgattctccccgacctcaacttgcgccccatctagcgagcccgcagaccacgcacagtcggactcgaaccacatcctccaacgtgttgccctactcaagcggctctcagcattaccacggcactccctcacctcctatgtctcaaatgactcttcctcaccatccaccatctcgccgcatgtctagcaccactacctcgacctcgtctaccagcaaccacccggtacacacgggaaacagtgtttctgacatccgacgaactgcttcggctcgctctgccaactctcagcttggatatgtggcccttatgcggcggcaaaaagctaccgtatggtgtgaccgggcacaacctgaagacgctagattgcgcgaacaagccctgcgggataagaaacgagcatacctcgaagttcatggctcaggcgctggccggtcaggaaccttggctagtggcaagattcgacatggtcctaagggagctgctgaattttcaccctcaaacctagtgggcgccaaagtccccgtgcgactcagcgcgaacgagatcggtgatggggacgatgacactctcagcagcgagggtggcgcaattcacagacggaccggtagcggccgcagctctctgggaagtgcccaccgctacccaagtggatactcgcggacaccgggaacaatgggcagcaacagcacgcctccgaacgaaaggacggaccttccagaagtatccgaaaatacaccggcggagattcacgaggaagaaaagagccgactgtcatacctccacaaagacgatgccgccacaacacacagcagcgaacaagagcaagaagactttgttggcgacatgttgggtccgaatgccggcactgcggcagccgataaagccctcaaagcatccgagttacgacgacgaggcagtgtagacgagcgaactacttccatgaccaatgtgcgactttttgtcgcaaaccccgattcagacagcgactgatgccctcgttctcatacggcgtctgccaactcttgtatccttcatctccttcccatatcgccccgccttctatcttttatgattttcacgtggtttctctttatgcctcgtcaactgcacataatacctatttcgttgcaactccacaccgaccccatttggcaaatcttgatggtttagaccaatgcgtccttctgctttgtccatatctttgcacgtttgctgtctgatttactccttttcatttaaagcgccacatctctgtttctctctaggcttccctctttcttgtcttgttgtatatcctcgatcgcactgctggtctccatagattggcttcctggcttgtcttcatccttctccggctgcatacgggccgtcctggcgttcgtcatatggcctagcttctcttaatttagaggtagtacctaattttcaaaccaaagatcatctcaatccgtcttgcatttgggataacttgtgtggagtggtatgggcttttgttgtagcttcttgcataggatagagcgaggtaattaaaccacgacagtaacagaaggacatacgcaacttgaaaatattgaaaatattgaaaaacacacaacaccatactcattccatattgaccttgggagtccacaatgatgccataaattgtacagcatactgaaaacccccacataaaacggcgcccatcgggcacttgggcactcggccctgccccagccctggaggtgggcacatatattggttacataagcacacacgtgcttatcggtcgcgagcgcgaaacgattaacgcgtcccagtgttggcccatctactccgtactccatatgttcatcaagcagcgaagtcgatattctgagattgaagaccaattgtcttttgtctgtcccttcaagtcgcgctttcccctgattggcacgacctaaaccactcatgaactgaagtcgcgatctatcacacgacagtctgtccccatcgccccttcctcacctacctacgctcctgagacttcggattcctacataaccaactctttccatctattctcgtatcaatggtacccaagacatctctatcgccgatgcagtcggtccggtcctttcccgcaccaccttcaccttcatccggtccccgaaaacgctcaattcacgaggttgatgatgccgatataccctcgccaaatgcgaagcgaccattgactgatttcgacggcggaaatcaagaaaatcgcgatccatctcttgcctcccagcctgccaacactacttccccgcaagttcagatcaagcgtaatcttccacctcccccctcggtcgaaatcgtgatgagaaggaccatacataaacaaaatgaagatggtgctggggaatcaacatccccaggcaccaatactgcttctaatcctgagcttggtacgccggcctctaagaaacgcaaggtagtatctgctggcacagattccaagcaacaagaaaaggaagccaaagagcgccagaaggccgaggagaaggcggaaagagaggaagagaaggcgaagaaagaagaggagaaagccaagagagaagaagagaggcgcctgaaggcagaggagaaaaagaagcgcgacgctgagcgtgatgaagagaaacgacacagagaggaagaaaagcgcaagaaagatgtccaacgtgaagaagagcgcaagcagcgcgacgaaaagaagaaagcaaaagaagatgaaagggctgccagggaagcagagaaacgtaaaaaggacgaggagaaggagaagaagacccgagtaagtggcattgacaattgatttagcagcaagcttcccatatactaaccaatcagtcacaaatgaaactgaactctttcttcaccaaaccatcggtaccttcggcctcatcaggacttgtattcacggctccttcgcctaagaaggcatctactcccgtcgattcctcttgcgaaactcgtggcgcgcagtctgactatgagcgagagtttcctgccttctttttacaatcgcatacagttgtggcaccccctcatcggttcgagcgtgacaccgaagccctcaatcacgtacacgaaacgatcgattcatgtctacgcaacgaaatccacacccaaacacatccattccgtcccacggaagtcttccagataattcctttccgtcgcgggcgtcagccaacgacctctgtcagagacatactattacagctacaaaggtctgacgaaactcagcctactcaaaatcagagcataatgccaacttcgaggccacaagaacttctacgtaaggtcacgatgaagtctctcaagtttggcgaggacatccgccctccctatcaaggaacttatacccgtcgcgtgtccgagttatccgcgagaagacttgcgcgaaatccttatcatcgagggctgccggatactgattatgattatgattccgaggcggaatgggaagaacccgaagaaggtgaagagctggactctgaagaagaagatgaaggcagtgaagagggcgaagatgatctcgaaggcttcctagatgacgaggatgatgcccttgccgagggcaaacgtcgtcttattgttggtgatctagagcctgtctctactggaatcaagtgggcggccaatggagtcgagcctgaaatggaggcctatcggatagagactatatccgatggggtcaagttccccatcgaccccttctcgactgcatattgggaaagagcaaagcccgtggatcaagtacttgggaaagcgcgacccgcgacagccctagacggcttccttgttcctgcagtcccaggggcagtggcgacgggcagtgctttacctcccacatcgaaagcgaaacggccattcccgccagaccaacttgcagagttcaaggaagctgttgaaggcagcgatctcagtaagattgggttggtcgagattttgaagaaacggttagtcctatcatctccgctaagttccgcttctattagagcatatactgatccaggtgtatctagattccctaaggtgtccaaagatacacttaaagctaccctggaccaggttgctgctcgtgtcggacaaaaagaagtggacaagaaatgggtttgtcggtgagagtatgctgaattacctacacgagtacctacgaacggagtttggatgtacctaagcatttgtaatgtcaccatgaacgattcacctatcatgatccaacagttttgctttttttatttattttaggagtcggggtatcccgggttagctgcatgaaatcaatgccggttgtgcgtgtcgtaggacgatgtatataagccaggatgatacccttgcatgtgcgcatgttgccactctatgacatctcgtatttctcgccttttaggcctcagtgggtgatttaataggctctccgatccctatttagtatgtcgcacatatgtgtaaaataggcctttaggatacgtaagagcagaaagtacacgtctataaaatccgaggggcgcatgaggggcgcatggacacctcattccctgcactgccaacgcatcgtctcgttgtactcggtacctggccctttaaccctgctagcgtcgttcttataagtcgtttctacttggcttttggcacttttgtagtctgcaactgtccgttccgaggattccttttttctattcagaatcccggccttttttttctggttttatactccgggtttccattagttacctatttttacttggatttgaaaacaaacccttcttccctccttatttttttcccttttcctcttcccccgccttttcttcccacacagtcatcctggaaaccacctgttccgccgatcgagtgcagtgtcactctgagcacctgagtttcatttcagaatgcgatagggatccgtcggctagggggggtttgcgactgtctgtcgctaatggcaagatggtagaacaccaagaggatcattcgtcctctttgcattctacaaccagtacgtcattatgtttttgcgcattttctcccttatatggggctgggacgctgaaagaggggcgctcctatctttatacccccttattgtgattgcagcccaatctgaccagctccagccgagcaaatacctactttccccaaggttaatacaccatgtcccttgtcgtatcgggcgcaagatcccgcatctgtgcctttacctccttcacctccgggatcgccagtcatgtcgcccacattcgtcaaatctccgttgaacgtggggccaggtgagttgggtggctcgggccgtgccagtgccacggtagtggccgctccttccaatggacacaatcccatacccgcgatggcttctatcatacctgtacccgtggaagatgtccctcagatttcattcgaagattttgccactcgctaccaccagaaccagcgcaagcaggcccaaaggaagcgactggagaagcgcctgcgtgccaccaaagtgtccattggcgtctctgcgcgtatggttcgtgtcgggctgactgcacagcgaggtctcgtcgaagccctccgccatgatgacaaagccagttttgttgctctctaccatacactccaagacctccaggaatcatgctctgcaccggctcccaacgatggccagaccgaagactccatggacggggagccatccttgggaactgacattggccgtttcccggatttccttcatcagctgagccctcagtctcggacggacttcctggaaattttgcggctggtccgctctgatccccagtttttggtcgaccggttgcaaagcctgtcgtcgtcccaattggctgcttttacttctcctgccactgctttggataccaatgatcctgcgtttccttccacctcccgggcccgggcccagtctttcttgaacaagagccagactcagtccactgccttcaaggaccacgcttatgcctttgagaggactgacccattatctgtacttctttttaacgtttttgccgctcccttggacccagggacgtctgaagcccgcttgcgtatggaagtgtggtcgtccgtctgcgctcaactaatgtccaacggaagtagtagatactatcctctgatcggccagatcctttcttcctggaccaccgacagcacttggaaagcccgctccaagtttgaactctacctgatggacattttacaaaccggtgcttttctcctagagcccatagccactccacccggactggattttgccatggattccctggaccccatgcgcacggatgttgcagaggaattctttgcttccgctgtggatggcttgttctctgtacttgatgacccggacggcggctttcctcacgccgtgctgcagtttgcaagagccgttttgcggaagctgaataaccccgagacccgcaggcgcttcctggagtttttgtttctccaatggttcttttccaagttcctctatcgcgcattgacctatcctgaggtatataagcctctagcccttggtgaacttgcgaaactgactccaatttgttattgctttgatagacccacggtcttctcttagatttccatatcagaaaggatgcccgcgagaaattgctgaaccaggttggacaccgtgcctacgctcaagtctttgctgttatgcgttcaatgtacgtcacctgaatcctctgccgatgcgacactgttgctaatatattcaaggaatcatttctcaccccctcgtccgataatcaaggacagtatcgagaacatgctctctcgattccatgacgcgatgccatcaaaggtctcgattgatccttctattccctcttcacaggcaccacttcgacgaaagtcttcttcaactttcttgatgatgtctgctttagatgtcctcacactcctagacactctcttccaacagacgccttcttctttgcattcctccccggcatctgcaggagttaattcttggccatccagtccaccatctttcaatcttcggccagactcacttacagattctggattcgctcgtttcaagcacgacacaagttcaaaacatacatccaatatcggttctatattctctatggagactcattctctcttcccaccggaaaatagcctgtctgaaaaggccgctcgcattcgattcgaactaaccgacttagaccatcccaatgagcggttgagcttggagcatccctccgatgagcattggactatcttctcagttgcagcagacggccatggcttaacatggagccttctccctgatagtagatatgaaacgtccaagggcccgattatcgaaagtgaagatgatacccagtccacgacgctaggactggaggaaaatcacgaagcattacagaccgcgatccttcgacttgtccaagaaaaccgcattcaagatgtgggcgactatgaattcgtttcacggaatactacgcagccggccgccatgtccttgaagcagcggttcaacgaagcgatgttctgctgccatcatgactctgattttgttggcgcacactactggtggaatgcttcacagcagcttgggcaacggggaatacctagctcatcgaggtcgacagacgattcatggatcttgggcccgatgcatgagaattatagtcgctcgctgatccaatcacgagctgtcattgagcgttgcgagagtgactttgtgtctctcgatcacagtctctgccgactccagactcaagtcaaagacctgacggccaccttttgcaagatccgagacaagatgtggtacatgagcgacgtcaagaactccatcagatatgaggaggctaaacacgtggctatggctttgaaagcgatgatctactcagcccgtctcttcaaccagtaccccgaagaacagcgttctcgttacggaacacgttctttgggtggctctttgttccagaaacccgaagtacaagttatgaacatgatgaaggcacccagtagccagggtggaccgaataagctgtctgacgagcaagtcgagctgacccagaaatggttatcgcacaacggcatcgacaatttctgcaagggagaagaaagaattcatcgattctgctacgaggtccgaatgagcatcaataaactagtgggtgaaacgatgaccgagacaccggtgttatgggcaagtgaacttttccagacggaacgctcgaaatatgaaggttactctcgcacattcccaggaatgtccatgccgagcactcctcggccctcaacgaccacaagcgaggacacaaactctgcttcccacttctacggtgccaatatacctctgctcgatcctacgtctcgtctttctccggatatcccgtcattgggtcacaagccctctttccaaagcattatttccgataaatggaggcctcagcgtgatttgccttcagttgacatgtcttctctcggaggctcaccaggccgtgctgcttcgacatctaccggtgacacctacagtacattctggtctgcacctcagaagcaccctatgtatgccgcaagcgcgtcgagcgtgtactcgcggccaccatctatgttcagtgagacggcaacccgtcagccccgtcgtgtcgaacgcaaaccgcatgggaagacggtgttcatggatgacttgagacagacactaactagtctcctcttgagcgatctgggctctccggtatggagctgcggtagtgagactgacgcctggttcaccaatgcgctgaaccagaaacgcattcaggtggaaatgcgccgacgagctgctgtccagaaattctacgtcgattatgacgagcgctctcagcatcttggtcagcaacgtggttcactgaaaggtcgccggagcaggtctatgggtaaccttcgtgaatcccaacacaaagctcctcgtgtggagccctcgtcgcagctaccgcagacatttatggaatcggacggacagtcggcattttcatacaaggcggtcttccgccggctgattgaagtgttctcgcgtcatggaaatccctttgtgaagctcaacgcgttgcgggacttgcgttccttggtggttgcgtcgctcatttcgccccaagatgccaattgccctactgatatcaactcttccccgggcgaaggtgagaggatgaggagcagtccgcaacttcatcgggccactcgccacagtttctcagaggtgcggcccaacaacctaccacagatggacccattgcttccttcctctcctcccgagtctgtcacatgtggctcccgacggtctgactactctactccgtccgaagcacaaattgtagcagctttgcgggatctcatcctagaaatgaagccgaagacccttttcagggacctacagtttatctccgcgttcgtcccaggagatcagctaaacaagacggattgcgggacagcattcctccaattcggtctggccgcactgagcctcaaagaagagatctgccacagcatggttgaaatcgccgaccgaatcgtcttccaagagctctcccgtcgtcatacccctttcgcctccgacttccaatcccgccctggccatgctatccaagacgcagcgggaatgtggatcatcactgccaaagaaggcaacccagtcgcacaacgcgaacttgcaatcctttatctgacccacccggagcttctcccacgcgtaacactccctctgaccctcccccgagataccttcaaggcggagatgatgtatcgacgggacaaagactctaaatcggatccgcagagtatgtgtctggcgctgcactggatgcagctgtcggccagtggtggtgatactcttgctcggaaccgacttcgtgagcgtgaggagtttgactcaatcgcatgagaggctttctggcctgtcttttctcgttttgttgtgtcttttttcttctctcattctttctcttcgctggttcgattttatttttccccttttctctctcactctctctttgactttctttcctttcttatctttacatcgcgtcgatgcatatatatccatatacccctgttcgggcgatctagttgggtttttttaacattcgtggactttgagactcttgcctcggatttccgtctgcgcttggctctggaacatgactggcgttcttcaatacatcggaagactaggcggtttgctgtcttaatctcagtttaatgttatatttcctttcctgtctatttaccagtaatgttcgtatcctttcatgctagcttttgaagatcaggacgaaagcgtcactgacagtttggccagttttcaaggctgtcgtatagcattaaggaggaggttgcctggacaacctcacaatatcatgttcaacctcccatagttatctcccatctaaacgttagctaagctggatgcatcgggtagatgatcgggccgacgtcatcgagtggatttgcacccccaccaacttgaccttatacatcttcttcttctttcctttgctactcgtgactagtgactactgtgagctgactcttatctatctgagtcaggctcatttgattcatccgtttttccccgtatcagatcaggcggtgctcagcctcttttttttcccgcacggattgcaaaatttgaagcctgtgatataatcaaaataaaacaggccacatccttttgattcccctattccccacccctggaaatcagtcttcttattacctcgtccacttgcaaatcgggcgacactcggtctttcctaactaccatcccaccatgactaccgcaccacacatgccgggcaaggcgcacagctccgatgatgtgcaccagcggccaagaggtaagtccaaactacatcagcaccagatggtgaccgacagcaacgagaggatctgaccggtgcattcttgcgccaactcaacaggcatcctcaagaactccaacccattccaaaccgcctccgctccgatggcacccaccgctccaccctcggttctaaccatatctgagcccgaggagaccaaggacatcaccatcctcaacaccctgcagaacgcaggccggcgatcctcgtccacccgcccagggtctcagtcgcgccgacagtcatcagccagcgcccatgacgacaccgagccccgcctaaagtgggatgaagcgaacctgtacctcaccgagcaggagaagacagcgaagatgaagatcgacgaaccgaagactccttacgccccccactacgaccccagcgaagacgaggagcagatgcgcctcgacgatgcaaagcaacgcctcatcgatgcgcagggcctcctcgtcgacgagctggacaagtcgaccaaaccccggaaagctgtggcagaagatgaaatccccgacctggagctcggtgagcccgaggaaaacctagaggatattgctatgaacgatgacgctcgtgtcttccgtgaccgtagcatgagtatggactcgcacaagagcgagaagcatgttcaggtcggcggggaagatgcaaatggcgccgaggcgcctgagcatgatccgctcttgacgactgaagaggcccgcgcacggcacgctcatttcgagcagcagcggaggaggcactatgagatgaggaatatcaaggagctacttgcgtatgttgatcccggtgctgcactgatatctcgattttgaaagctgacttgagacatctagccatcccgaggatttggacgaggaaatggaagacaacgacggatcggagactggttccccgtcgtctatgcctcaaattcctgaacggttccgtaccaacggaaaatagagatggcgcccccttgtttttttcctgatctttccatgtgctttcgtatatttgggtctagcttttctcctacagcggggtggccttaggtgatttcagattgccctcgcgctagtctctccagtttttttttgaattctgtgttctgtttttctgtgtatattcccccagtgttatcgccctttgccgggatctttattcttgctcgcgtttagtctgggtttccacttcgcaaactatctcttcgctctagaccgaggtatatccatttgtggccctttgatccaggtaaatgaatacatgatttgccttgccgagacagatatagcatttaaacatcatagcatcgtcgcttcttgtctaattaagctctgatgatctggagatcgtccctgggcttgtcctacatggatataaaggcgaaaacaagtatatttgtgttactagacaccctatggtctttataatactaccaaccaacacctgtaatttaagaatggcccacatcatgatcgacattcagctgagattctacagccactgggcatcaatgcgcgtcgaagacaggttcacattggtcggaataaggaaaagcaatcataacattcgatctgcagccaggggatgaaaatacggagagctggtatctcattagtcccttgaatttaggaaaatataggcgatgtgcctcccaagccatctacttttggtccatgtatatatttcgcatgaacctcttcgctcagtcctaattttttcatctcctgctttgttttcttgataaatcaatccagaatagcgataaaccaggccttgaaaaatgcatcctttaccggtccctaagaaacatgtttcatggcaaacatggggatatcactggcgctcgtccgatacgtttattctcagcagcatgtccatggcactgttcacaggttcgtgccttgaacgattacatcgaagacgttggatcgtatcttatgactgaaattgcttctttagatgagatgctcttcgccttcatggtcccattactcccttacatcttcgagaaccgcttagagctagacacgtccctcacccagcgattgacctccctatttctagttgaaggagcgttgatatctatcatctcgagtccgtttgtcgggaatatagccgaccgggccagctccaagaaggtcctactactggtgttgctggtactgacgctgatcagcgtattatgtctatcgatcaccacatcatgtaagttttttgttagaatcgcactatcaccctattgctaaatgagcccagtgacctggcttttgatcggtcgcttcttccaatgcattgtcagcaacgcattattcatcgtcggcatggccacaatgaccgagaacatcggatcagaacatatgggcaagatagcaggcttgagcacgaccatagtagcagccggtacatgttccggtcccgtcattgccgggtttctcttcggaatcggaggatactggacagcgtgggcgggcgcggctctgttcctcgtcgtggatatcattatgcgtctgctcatgattgaaaaaccacagaaacgccgcgagaccgcttgtcaagatcgaaatagcagcgaatccctatgcgccgaggagcagacaccctcgtcggaaacagaaccgcttctcgatgcgggtcagtcgtcgagtacagaggaaattggcggttggagcttctacgtctgtcttttccgtcagcgtcgctttacggcgggggttacttgctattttgtctttgcgttgtttatcgcctgctttgagtcgacgattgccatgcatgtccggtatgcttttggctggggcgttttcccggtcgggcttttgttcgcgtctatacaaggaccggggatggtcttggctcctcttgttgggtacttgaaagaccgtgtgggatcgagggtgcctactactattgggtttctctctgttgcgcctttcctgtggtttcttggagtcgctggtgatgagcgctttccgtgggctacgttgggaacaaggggtaagattatttatgccgtctgtacgactatgattgggtgctttatgtgcttgcttatgggtgttgggacgatggaagctactggtaagttggggtgtcatttctagagactggaatgctgatttgttctttgcagcaaccgtcgatgagttggaggatttacatcctggcgtattcggtccctacggagggtactctcgtgctatttcaatcacgaacatgagttggatgtccggtctactagtcggacccatcttggctgggtttatggtcgaaagatttgggtattttgagctgcagtgtgtacttggtaagtgatgtgtgtcggcggcttgcttcccattctaacaatatatagtggttatttccttgctggctagcgccaacgctgccttttacctccgtccaaccagtccccggaaaggagagtgtaatactagtgaatttgggaccgacgaagaactctaattgctagacgtctaagagaatagaatttatggcaataatgttgattcggcttgtcagcttgtgtgggggacgcggtcaatgtgtgtaagaacacagctgtcaaaaatatgcatcagagacaacttgtaataattgaacacgacattatcatcgttggcatctgcaccttgccaatcccttacctgctttgccaatgtgcttgcgcgtatgtaggttgagagtttcggtcacatctgcatgtgtccgtttccgaatgtggcttggctgaagctgactgtatttggctttatcctttgtacggagttaatctgcgtggtaatttagtttaagtgtaatattcaattagcatcttctaatgcaatcttgttaggaggttacacgcagagatgttagatgcatggtgcaatgtgaggttagtattttattaaacggtcgaagaagctgaatattaactactactagagactatttatgaggtctgacagatattttgaatattatattctattgttacctattgagaaacactgctttcacatttctaaccactgtataagaagccattccatatcagccagggtgattgttggctggcgcaatggttcgagacctctagtacctactagggaaaccccacaattccaagagatccccccttaagctccttgaacattcctaggatcggccttccgaaaaattgacaaggtgtgatctcgaggttgtgggcgacctccacgttaggatgatcttccatcttactttggtgatcacctacatcactaacccaacaataaagcaataatcccgagggtatcaaaggcctagatgcctcgggtaacagagtacggagtatatatcaggggttacacctggtcaatgctccggggtgtcttaaccctacggagaggtcaggtgcaacctcggtgatcgtggcgatcaagggagaagaatggtagcagggtatgcagctaccagctctattaattctggctatttgcactgaacttgatggtaaatacattgcatgatgcaggacttagataactatctgcttctcaataagtagctctttaaatctgggcaagattgccttcatatcgtacatgttctcaaacttccctcatagacggtggatgctaaatgtctaattattcttatccctctggttacaatatcaataagagaaaaactatctttaggaagggcctatgagattcacataatttccatccgatatatagaaaccgcttcggacaatggctcagatatccggcatatgtatatcgacatattttcaaagttatagaggctcggatcttgatagttgtccactcagaatgtacccatgaaatgtgctgcgcatataatactatcttatatacctaggcatttgcggtaaatcctaaagaaccatttggctggtagaaacacatatactagtataacgtaccagggtccttaggatacatgaaacatatattaatgctataacaattattgaagctattgaaagttgcgacctgtgcaagatatctaaaattagaagtgtgagtgtgtactccgtagagattaacccaaccaagtgcaacattgatattcccacgtttaaaaaaatgttaacaaacagaaacataggaaatgtacggagtagaaaaacaaaaatagattcaaggtggatgtgatacgtcgatcatgaaacaacataataactgacaggtggtggggattgattagtggcctgattattgacaaggcaactgcaccccctgcggaatcaaaaccccctatttcttttaacctcaacacaccctcaatttcaatcctatcaatcatgccggacaccgctgatcagaatgcgcccgttgcgcctgttgcgcccgttgcgaccgctgtgcctgaagaagccgtcaataagcccgtggaaactcccgcgactgctgccgaaaacaccgaacagactgcagccaaagatgtaactgccagtgctccagtcaaggaggaattcgctgcaaatgatgcgactgtcgctgccactggcactgcagagcccgaagccgcaaagcctgaagaacccaaggttgagcaaccagcctacctgagcaagaacccggccttgggtgaattgttcaatcgcctgccaaccatcctcgaaagcaccggccacactgagatgtggggagtagaactcaaggatagcaatgatgtccccaccgtcaacgtgttgatcaagttcctgcgcgcaaacgaaggcaatgccaaagctgctgagacccagctcagcaaggcactcaagtggcgcaaggaggtgaacccgctggcattagcggagtccgcgaaatacagcgcgaccaagttcggcggtttgggatacctgactacctacgaggagaacggacggcccttggtgtttacttggaatatctacggcgctgtgaaggatatcagtgcgacattctcggataccgatgagtaagaacccatcatggaacgccatttacaattgcaatcaatgctaactgcgtatagattcgtccaatggcgtgccgctctcatggaacttgctgtgcaggacctgaagatgaaggatgccactgaggtcatcgagtacgacggcgaggatccctaccagatgatccaagtgcacgattacttaaatgtcaagttcttccgtatggatccatctgtccgtgccgcaacgaagaaggtcattgaagtgttcgctacggcatacccagagctcctgagtgagaagttcttcgtcaatgtgcctgctatcatgggctggatgttcactgccatgaagtttatcctgagccgcaatactacgcgcaagttccacccgatcacaaacggcgccaacctggctcgggaattccctgcttcaattgccgaacagatccccaaagtctatggtggcaagggtccggagctgaaggagaatgctaggttcatcccactgatcgaggacaaggaagaggagacaaagtgcaagggcaagtctgccgagaagtctgccgaggagcctactgttgctgagcccaccaaggaggagactgctaaggagcctgccacagcagatgttcccaaggccgagtctctgaaggaagaagctgtgaaggatggagcccagtagttcaaattggctggtgctgtctgttatgatacccggaggagcagtgaataacactccccgctcttgtgtacctggtttcgggtcatttgtgtgctctctcaagatgcactgtattgttaataccttatggctagccatacctaatactattattatctctttatcacaatgaagattgattgatgtcttcatgaagcgaaagcagcctaatgtaggcttggctgtacggtagcttatacggctgactttagaaccactcgcgcaactcttatcgacaagctttcatcttccttcattcactgtattacttctgtccattgaaatccgctgcgtcttatccaccatttagatacaatactgactcaatagcaaggcctgttattgtctagtctgtggatccgctggcggtggcctcagaatgcgactcgcttcctaaacctcatctgccccctcccttcacctcacttttcgcgatagcaccattattatctaaacccgaatttatctcgatcttttcctcacacacattcattccagaccacggccttccatcatgtctgtctggaaccctgataacatccgcgatgtcgccgaatccgtcggtatcctcaacctcaataacgatgtgaccgagaatctcgcccgggacgtcgaatatcgagttgcgcaggtcttggaggaagcactgaagtgtatgcgccactgtaagcgaacggttcttaccactcaagacattgcgctggcattgcgcaacctggacgtggagccattgtacggctacgactccacccgtccgttgaagttcggcgaagcctctctaggacctggccaaccgctgttctacgttgaggatgaggaggttgactttgagaagttgatcaatgcgcccctgccaaaggttccccgcgaagtctccttcactggtgagtgaatactcttccctacttatgtgctgtacagcctctaacgtctactctagcccactggttagctgttgaaggtgtgcagccgtcgatcccccagaacccgaccgctgccgattctcgtaacctcgaattgatctcgaagggtccgaacgccaactccacactggcggcaatcagtggcacaggcgatgtggctgtcaagccactggtcaagcatgtgctttcaagggaactccagctctactttgaaaaggtctgcagtgctttcttgaacgaaacaagcgaagattatcgcacctccgggtattccagccttcgcgaggacccaggtctgcaccagctggtgccatactttgtccaattcattgccgagaaggttacgcatagtctcaagaatgttttcgttctcactcaggtgatgcacatggccgaggcgctggttcagaacaagtcactttacgtagacccttacgtgagcaaacctactatcagagaagaacatgatcagacgctaaccgcatcagatcgcatccctcgtaccatccattcttacctgcctcatcggtcgacagctcggcggacctgcggatctcgcagagtcattcgctctgcgcgatatggccgcctctctcctcagcctaatcgccaaaaagtactcccactcatctcacatgctcaagcctcgactcgtgcgctcctgtctcaagaccttcctcgacccttcaaagccattcggtgctcactatggtgctgtcatcggactgcaatctgtcggcggctctgaagtaatccgagtgctcgtcattcccaatttgcacgaatatactaaactcctcggcgatggattggacgatgctgctcgtcggccagctgccgagcgagttctgagtgcacttgtggctgtgttgggctcgctgcgtagtagtcaaccgtttttgaccaatggtcatactgtcacagacgacctccgctccagactagttgacaaagtcggtgatatcattgcatcaagaatcgtggaggctggtgaggtgcagctagcacatatcattttggaatcatgaactttcgcatggtatctctcgggtgcttttgcgatgagatcccgatgattgttcgtacgacatggcgttatttcgggcgttggttcagggattatggatacctagtagacatattcaggatgtggatgtgtttcattcttaaataatcacgttgacacacacattgatcagtgtgttttatatggtaactccatccatggatatcctagtgcattcccctatttgatatctatctcgacttttcttccctcgggaaacgaagggctttgctttttgcacatgtgcttactctcatgggtcataattttgtggcgcttgtctgttgtcattcacattggtagtggcttgcgtagaattcatattggtagtggcttgcgtagaatacgcatacatagacgcttgggccccccgttatatgctgagtcatgcatagcttatgtaatgtcttcagggacaaagtttatttctgcctagtctcaccgctcctgtgagaaccagggcctcgctttggcgttttctttcgtctctcacaggttgaaatcatccgtggcagtctgcacattactgcagctctaacttgcccaatttgtgtgtaacatattacagaccccaatactccgtatattccctgcaattgaaactaacacaattgtttccctgatgtcagacaaattttgatccgatttgccccacactgccgcgggcccacaaagaaaatcactcattaccaaccgagctgaccttcagcaaacattttgcacttcccctcccactcgaggtcaccaaggccacaacaaaaactgctttgccaatattttttttcttagcgagagattccttgttctctctagcccacaagtaatcaatccttgatctcgggcacccatcgggcttttgggtgagactgtcctacagacaaacccccgccgatgttcacgactgtggccctccgctacctcgtgctgatttaagtcggacttgtcttcgccttccatgagcccaactgatcttctgcgattcttgtctaagcccgcgaagtaagtgtgatttttccctctgtgtttggaaaagccaaaacaatcaaagccattgaatcgagacatcacggccaatgtctatcttttattatagcactgtttctaaccagcatcctgctctaggcctcgataacgcgactcccgtcgtcaccaacgcctacattttcgaatacccttttttcaaagcagaattctcgtctgctagacccgatactttgaccggtatcggtatctttcaggacgagggtaccgactgctagtcaccatttctcttagcatcttcttcttgtccttcgccttccgccctccttagcagccctttggtctgtttggagattatacccgcctggtctgaccagttaaatctttgtttcagggccttctcttctcagacgggcatcgcccccttggccgtctgggtaagtagacagtgcttctatagcctatcttctcgaagtacatagggcggtccgacgtcactgtttctgcttcgttcaacccaaacaagtacaacagctcaagctacatccgtcatcatggtttacgtcggtattccaacgaactacaccacctcgccgtcctcgttcgtcgcggggaccccgtctctgacaatcaactatgaggccacccaggatctcgactcgaccaatgccttcgaaggtcctgagaagcttctcgaggtatggtttgcgccatctgccgctgaactaggcgccgccggccccgagggcctcaagaaagtgcccggggaaatctggaaggacatgttggacctggtcaactgccaagtgctttccgttatctcctccgatgagatggacgcctaccttctgtcggagtccagcatgtttgtctggccgcacaagttgattctcaagacgtgcggaactaccaccttgctttcgggactcccccgcatcttggagatcgctgctctgtttgcaggcttcccacgcgctacggcgcctccatcccggggtatcacggtggctgcggctccctaccgagtcttctacagccggaagaacttcctcttccccgaccgtcaacgtggcccccaccgcagctggcgcgatgaggtgcgctctatggacaagttattcgtcaacggcagcgcctacatgatcgggaagatgaatggagaacattggtatctctaccttaccgagcctggcaccgtactcaccccaccggcgagtcctaaggaggaggttgacttccgcgagaccgaaaccaaggttctcagcttccctgaagccaaactgcgcactgattgtgatgagcacgatgagactctcgaggttctgatgaccgaccttgaccaggaaaatgcgaagcagttctatctcgaaaacgccactgctgtggccgagaagcgtcaccgcaactcggagaaagacgatgatcatctggatgtcttcagcaacacctccgacatggatgaggagactggtggcatcttgccacccgagctcaccactgagggccacgctctgggcactatcgtctctgaggcatgcggcctgtccgacgtgtactccaagagcaagttcccggatgctcgcatcgatgcgtacctcttcactccatgtggcttctcggccaatggcgttgtgccggctcctgatggcaacgccccgatccactacttcactgtgcatgtcacaccggagcctcagtgttcgtacgcgtctttcgagaccaacgttccgcactctcagaatggcaaggccaccgccgacatcatccagcaggttgttgcgatcttcaagcctggccgtttcagcatcaccttgttcgagactaagcccgcgttggatgagctcgacgaggcgaatgggcagcatgatgtggcgcacgctcagcgccaggctcatcgacgcagcaacaagatggagcatgtcgaaggctaccgtcgtgtcgatcgcatcgtccatgacctgaacggttatgatcttgtgttccgttactacgaacgcaatgactggaaagggggggcaccgcgacttggagagaagggattctgagctgacctggttcttcagccatccgttattggactatctccttctcgcgggtgcgacctttctatccgtttgggtttctgcctacttggcattcaattttgcacagttctttctgttttgtttatttctatttttcgtgtcatctcgtttatttccttccatagtgcacagcatcgcatgattaagctgagcgactcattcttttgtcatttgttacagtggttcagtcgagaaatcttgaaacataggtatatcgagcttctcagaatttcggtttgtcattcctttgatcatacatcatacctggtttcgaagactcattttagagtccattcaagcgtcttgagctgcaatactatcattttctgcaacatattctttccagtgtagagtgtaaattcgaattctaagattgcgtacggagtacagcattcaatgtagtgtcatagtccacctcggacggaaggcggtgagatgcgtccttatcttgtcttttgtccaaattacttccaatcgatcaacgagctacattcgaaaccctgcaaataatatcgctatctacggtcctttgagagatacattactttcagtccaactagcattcattctttgttccaacccgaggttgatatcgaccttcctcccccggcgcaacggcgcagcgcgaaatcctcggccctcgaaagagctacacctggcgctcatattctaccgagaagattgggcattctcgtagccgactattttgaacacaagcttaccgagccatcatacgcgcaacacatcgcgcgcccatttacccactacaacctctcaaaatgtcgtcaccaccaccataccaatcgtcatccaatcccctcaaacgaccctccatctcctctgcctcacagccgattggcaagaaacagcgcatgcatccactccgccaaacttcattcccgaacggcatcgatgttggagatcgcagtttcgctggtaccagcgaagccggtagcgtgacaggcagtttcacagggagtctaggcggagcaagcgcagatggaatcttctctgccgcacggggaaagaaacgcggacgcaagagtaaagccgagaaagagcgggaacgggagcgcgatgatgctctcagcgctagggcgggagattctacacggttcggatcagtcgataacgagggttcggtccgaggtggtccttctggcggcggaggcggcggtggaggtgctgatgatgcggacgattatgatgacgacgacgaggcagagctgtttgggcagcaagaaggagctacggatacagaggctgagaagaagaacctagcgtacgttttctcctgtcttcgtggtaacattggatgaagctaattctcgctcttggacaggatcctggttgatgctttcaaccctatgcaatcggagcgatacgatctcttcaagcgagcgaagctgcgcaaggaaacactccgccgtatcgttaaccatgccctctcacaatccgtcccggccagcgtggtcacgaccgtcaacggcttcaccaaggtcttcgccggtgaggtgattgaaatggcgcgaacggttcaggcccaatgggccgaagcacacgaccttgctgcgcgcgatgcgttcgaggccgaagaagccgctgccgaagccgcggcccaggcgaaagcctcagctgcgaacgcaaattcaaaacactccacaccaacccccacaggcactccaacctctttcggcaatggtgttaaaaaagaaccacatgactctagtcgtacacctacaccctctatccctacttatcagaactctccgcaccaaactcccactcctctccgccccagacgcgagttccgtcttccgccaaacccacaccgtggccaacttcttccatcgcatttgcgtgaagcggtacggcgaacgaagcgtgatggtgaaggtggtggagtcggctactcgggattgagtctggagaacctgggagttcgaggctcattcacgtggaactcggggagtgcaggtgggaggaggcttttcagatgagaactcagtgctcgttgcatatttggtgagattttttactttcttttcatgtctaatactacactaaaattagcgatctggactttgggggaaaattgatacggcagactggctctgatatcacgattcttctcttccgcaacatactatgtatgcatgtactatgaacagacttgaatccagtcttaatttagaacacaagcgtatcaatcgcacattccattagatttgatcgatcgaacccagacgccctcgatcttggcaggggcgaagaatgccggtgtcatttacaacacatctaagtactccgtgcaggcagacatgattcgtattggacaggagctattgtctagggttaattatttgctccattctcttcatgtggtctctcacggtataccctatgtgtcgaattctactgttttcaaacagtcaagtctactcctagtgtaaccgacataccaaacacagccatgttctggatactacatatcacagaagggtggtgcttttctcaacttcatcctgctgcctatgtggctaggtggtctggttgggtacatggcgttctcggaattagggctattctcaatgtcatacagtagacggagcacggagcagagatggactaaatggaaatacatagtagacctatcctttatccccatccaaaatcaagaatgaggtagatcatttattcgaccctgcagaaagccaccgcgcatgtgcagcccttgctgctatccgagtggcgttctcctctccgttcctgcaataatgtgggactacatagtccgatgtccacctgtctcccacggaatatgcgattggatctgagcacatcagggctggcgcttgcagggccgcgtcgactgcaactcctttcttccttggcagcctctttcttgatgggatcgccgagggaggggattgctacgtatcccagtttcttacatgtctctgctttctttgtgttccttttactgtcattctattctttttataccctcttttttcggttggagtgggatagtcgtccttcttatctcatagcctgattcttattcggatattggacgtctttgacttgcgtttataatgcactccctccagccctccaatctatacacccgtttaatagatacaatacctacagccttgccttggtcctccggggatccatcggtgaaaggagatcccaggaagagtgttaaatgggttgacgtatgtcttgaaagcagataatatacgatatttctaacatgtttaacttctagggcctgagaggaatcgcctcattcctagtagtgctaacgcacctcgcccgcgcttgggactatgatctattctcaccacgcgacaacgaggacgccagtccgcgaatcctccaatggcccatcctccgaatcccctggcaaggccgtctaggcgtaacgatcttcgccttcctaaccggctacgtctgcgcgttgaaaccgctcaagctgtcgcgaacaggtgatacattaggcgcattcgagacaatagcaaaaagcgcctttcgtcgaccgccacgactcatctttcccgcgacgattgccctggtcatctcgtggactgttgcgcaattcggcgggtttatagtcgccaatagatccgattgctggtggtgtcggtatgccgcgccggatctggaggattcgttttggaaggagcttgttcggttgccgatgaatttcttatcgacttggacgaccggatatatggcgtacgatgatcatcagtgggcgcttctgccgctgctggtgtcgtccatgttggtttatctagtgctttcggcgactatgtttgtcaagtttcggtatagggtcttgatctatgttgggttattattgtatttccatcaggatgcagccaaggatataggtgagtgttgctcgtggaaacaacatatgagccttcaatttagtgctcgtggcagacaaaatgacccatcgctaatgccgagtacagaaaccttccaaatgcaagccatctacggcatgctcctcagcgacttctcctaccacgcacccctcaaagattggatagaagaccacccacgaggccggaagatgctcaccatcccgctcactatcatcgcattattcctcgcttcatacccaggcgaacaccccgaatgggccggctggtccaacgcaatgctcgaagcaagtcaatacatcttcccgccagacgtcaatgtcgggaaacgctacacggccctcgcaattgacatgatcatcctcgcgatcttcttttcgccttcgacgaaagacttcctctccagcagactcctactctggctcggcaagcagagtttcgccgtctacctcatccacggaaccatgttgcgtgtcgtgctctgctggatgctgtatggtatcagcgggcagccgtgggagggtcctgaggcgttgaccgatgacgtccgcgacgactggttgcctatccggccgccgtgggtcgttgcaattagtattccggtctggattgggatggtctatttccttgctgcgctgtggacggcgtatgtggatactttctgtgcttctctaacgcagaagctggagagggctgcttttgttgaggacgagaagacgccgttgccgttgcaatcggtccctatgcagacggcttgatatagatttaagttgactcacctgggcttttggtgttttgtggctgctttccttcgacatggctggaccatggccatgggtgtaaatatgacttgttctggcttttccctttgctcttcgcgtctttatccaatgcaatagcaaaatcagtaatgaaagcttcaattatagaagtgtacatagccaaatggagattgtggtcaagtaaattccactcttcaaatcacgaaaacaaaatgcgaatgctactgcgccatattttacagtttgtctaaacacacgccgatcaagcacggcgagagccacgccgcccgttgggtttgcgagctgccgtctggctattcttcaaggacttgcttgccttggcccgttcgttctctagggtttgcatgtgctccttgcggcggagttcgttacgctccttccgcatgagctcatcctcgtcttttcgctgttgttcgtattcatcagcgcgcttcttcttgtccttggcgagacgttgctccaccgttgaagtgccaatgctttctgagacagactttgagaagttggtgccgactttgccgaatttgttgtagatgcggtcaatcaagctgattttcccaccttgttccggggaggcagctagttcgctgcgtgctttctcttgtgctttctcttgcgcggctttttccttctcaagccgttccagcagcctgcgaaggggcttgctttcggtgttttgggtaactgccgagtacttcggtccattggatggtctccgggcgatcgacaggtgcatccacttccggaaggcctccgagttgatcaaataagtttgacctaggccgaaaataccacttgccacaaagtagagctgcagggcactcggcatgaacgccatgaaggcaaaagacatgacagggaaaccatacacgatgtactttcctgcttcagtttgcatcatgggcatagcgccggattcaccacctctctgttatcttggttagtatcgcagttatagtagaccatatgagaccaacttaccctcagagacagacacagcgtgcctgcagccatcataggcaagatgtacgtaggatcagcaacagtcagatccttaagccatcccacttgttccgcggctagggccggcactggcaacgtagtcattgctcgcacgactcggaaacatccgaaaccaagtggaatttgcaacatgggaataaatgacttccatgtgacaatgccgtgcttctggttgatctcgttgatctgggccctcaaaatctgggcttcctgctggttcccatcggtcgtggcagtaaacatccttttccggaggggctcagtctccggtttggcgttggtcattcttgtagaattctcggaggcgccaatgacagccttcagcattgccacacgagtcaaaataccgacggccacgatactagcccaccatggcaagccggtccatatgtgagtgtgctcgataagccattgcattgtcgtcgtgaagccccagccgaagtccagcccaagctccttgagatatccaatggtctccgggatcgcggtaatctcagtcatgtctaccgtatttttcaatgagccgtctatagcatattcagggagtacgtcggggtgggtagaggaggtggaattgaatcggattgcggccgggccgacaacagctggtgtcatgcgccagggagcactgccggatagtgctgatttcaattggctccgctggctagggaaccgcaggctttgtgaccgcaaggtagacatctgcaaagccaagtcaatttcgatgtttttgcaaatccgagtcaacgggagaacagacagatctagaggagcgggacatggcggtcattctctgacgggcaagggcagcggctgcgccggaccctttcaggccaacagatcccatcatggtggtttggataattagaaatggggagatagccagtacggaagagttgttctcgtgccgttcggcgcgactttttctgcccgggcggtaaatgctgacccacggctatgttgtacaggacaggcacagagactcggagattcgaatatggaaatatagataaatagatggaattcatagacttagatattctatatggtaacaacatctggttgcaaatgtaaatcctaattcgccaaacgcccccctgagccaaaaggtctatgtacaaccactaaattcaggtgtgcacagaaagccaggtatcgatcccaaatcacatatgcttcgattttgtcctccgcgtaaatgcagtcattgttgaacggatcaaacggcagaaacatcaatcacttattccaaagaagcagtgtccctcagtccagggcgtctccgctccgaaggaagctcccgcatttcaacaccggggcccactgcatgtgagcggcgatggttggggaagatctataataatgggagcagctaatcagtcatagaatccaaattgacttatgtaaaactactcataccttagtgttagaccatccaaggcggaaagcagcctcgtgtgcgaacagctctccaaagcctagcatgagaccattgacgaaggggaggaagaggttgatgaccgctccgcgaaggagaccccacacacttggcggcttataaagcatcatgagtgagcttgtggttgatgggaccgaggaggacaattcatggttcgcggagtagttctctgagtcggaggggacggtgatggcagagtcgtagagctcggcgggcgaggcggaggtggggtcggaggccattattaggatcggaaaagaccgaggatttgtgttgtgtctttaaataacggcgtctgagttggtgttgacccttgatctcgagaaaaaggtaaagtaaaatgatgcgatggtcccgatgagctcgttggggtatcatgtgggttatgtcagcaggttttgtgccgcgggcgcctatcccgttgaataaacaatggccttcctaactaggagaggcgattacaaccctctgctttcaatcttcgaatgtttctctttatccatcactaattttatagagctcatgtttaatgtaaagaaaaaaaaactagcagcacccaagatagtcacgcttgttatattcattgacgggaagtcacttgcaacatgaagaacttgacactaatggaggaatgattcgagcaaatagatatgtaaaatacaactatcagccaagcccatcgattccatctatcaatgcaagatgattcctgcttaccaccaccgtctacatctcgagtgttctctaatgtatcaaactattcatcccactagatcaaaacgactccaatcggctcataattatgtgctcaaaacaaattttatattaaaaaataaaaactatctatatgttaagtttcaaaaccaagtatatatgcaatggatatcaaaagacgccgccaatgtcatccatgttcttttccacatcagtcataccagtaaaccatttccacaatgctccacaagctgaaagaaatgaaaaaaattacctcctttttaaaaattcccgggaccaattcccgagatcaagtttggcaacccctatgccttgacagccttctcctcgtcctcatggtaagcgaacctcgacagacgacgaatggcctctcccttgaagtagaagacatagggaatggcgcagcaagccaggccgatgaatgcaagaagcgaactggcccattcgtcgcccagacgctcgtacatttgctctgtgaagagcacggtggaggcaccccagatggaacggatgaaggtcttggctgcgagagcggatgcggcttggtgctggtaggtgtcaactggagagatagttagcaatgactcaaatcaaaaagattgaatgcttttgatacataccaaggtagttgttggcggagttgtacagcaggataataccgaatccaataaggaagcctcccatagccggtcccatccagtgaatgtgggggtaggaggtccaggcgaagacgaaaagaccagaaggcacacaccagcaagcacacatcatgggaatcagacgtttttcggcgggaggcttaccaccgcatgccgcagacattttgaggtagtgcttgttgacaaaaggagcgcaagctgcgctcatgaccacaccgatggccagaggaatgaacatgagaccggtattagacgcgctccatcctttgccgccctggtaaacaatggggtagctagaaatatagttagtttccagtctcttttaagtgtataaagacaaaaggttgttcacttacgcaacgaagaacatgtatagcaagccataaatgacagacatgtagagagaaatgaacaagacgatgggttcaaggaacagaagctggaaggggcgaagaatgaagacgcgcaactcctcagccaatggacgagcatcaagctcggtttcggtggtatatttagggtcgtcctcggtcttgcggagtttcgctgcacgtctctttagaataattggtgcgaatgtctcaggaacggtgaaactgatcatgacccaggcaacgaaggccaggataagctgaagccagtaaagccagcgccagccagcattgtcggccaaaaatccaccagcaagtggaccgatggccggaccaaggaagggagcagcgctgaaagcagccatgggaacaccacgctcctcgctcctccacaaatcggccaaagttccaccgacaagggtcatgggggcactgaaagcgattccgtcgatcaaacggcagacaatgagagttccaatgttcttagaaacagcacatggaatgacgaaaataactgcgagtgccagggtcagagcgtagacgggtcgacgtccgaagatctctgacatcggagcaaagaccatgggtcctaaaataaggttagaactatgcaacccatatcacacatctgtattactcaccaacaccaaatccaataacgaaaaccgtgacaataagcaagctaacttcacggctgacatggaaggactccatgggtccctcaatatcggctgtaatgacactactgcaaaaggcgacgacgaagcaggtgaatgcgacaaccatcgtgcaataccacttgtaagccttggaccagttcttgggattatcaggatcgtcgatggtgaaggtcaccatcttccaatcctcgaatttaccagtcacattggacttgatcggcctgatgatttcacccgtctgcgtctcagtgatgtattcgcgtaaatccgcatcatcggtgacctcgcggacaggtagatcgaggtaatcatcgggtacggctgcattgttgttctgagccccgagggagaccgtccggatagcctctactggggtcccatctgtgtgggtctcagccgagcgtggagcctccatgttgaaggatatgactgatgatggagggctgtacccagacaaagtatgaagtgctgtgtagttatgggtgcagggtggtataggcgcaaggggggtataggtgcaaggcgttgtattaggtgcaaggtattgcgatggctcgagatgttgtaatggtggcaagctatggtcatacaatccgggggggcattcttttataattcaactccaataaaattcggcgccgaaatttcgagaagtgggtcatgatagaaaggaaaaagcaacaaagaatgatccatggacgaactgttcataacattccatcgccgtttttcctacaagaagctctgatatcggcccgcaaccaggtgggttgcctaatagggaatggcggaactagcctaatcaggcaatatgcgacgacagacgccttggcattacagcttgattcatgatacctcattttcctttgggaaaaagacacttgctatacttttctattaccaatgtgaagctctagacttatcagcgtgcagctctactcattggcatgtcggtaagcccaccctggcgggcctttccaaggagactacgactgttacacttcggagtagagaatgcgctttccatgtcgatcaatgtgattgttgagcaacaacagctgaatgcgttgtagcctgggatatttcttttgctgctgtatacttcctatcttcttcaagggatgtctttccgagttccagcttggcatcagcttggcatcacgcgaaagcgggtcgggctgtgaccaccacgcgtcgtgagatcaatcaaggcgatcgtaatatagaggccgaattaggagagcgagaattatgaaacatagtcatcctttagatcaaacaaaccttaaaaacggattcgaacacgtagatatccaatactccgtagttgtatctactttgttctggaagagacgacctgaaacagcattgaacttattttgatcattagcttggcctaggcatattatgcacattgtcacatggatttgtatacatacaacttttccgcccagtgggccacggtaggttaatatgactgtgtttttgtgccccacctgtatagttcggaacatatcgcccaatttggaagactactttatttccacattgggaatatcaaacctctgcaaggcgggatgtcgattcgccacggcatttttagatgttctagattccttacatcaaacctaggctttgttcgctggccaatgagagcacttgccagcggttatgggtcccgtctagcatctatgaagctaggtatcttttgtatgggtggaccatataaaagatacaagtctcccagtccttaccccagaattagtgcaatatgtgtttttccggttgtttgtgtggaaatttttctccgtattattgttggagggcatactccgtactccgtaccccatacccataccccttggtggaaattctacccctatccccataataaatgtttgtttttatttcttcgactcatgtatacgcaggaagtacactatggattaccaatgtcagataaggattccgctagtatacgagatccctcgtttcaggcagacccagaccctaattgtggcgtcaaaatatcacagatctcatcatgatgcaaccctggaagtgtcgcaaatgtcacgacgccgaattggggtgaactcgaactttaatttggtggtcacaccggtatcgtgcgtataagccccacttttcatatatccaaaagtccaaattccaaaaatccacgtctttccaaatccgctaactcgggcccgtaccggaaaattccccttacgatcatgtcggcctcgatgcggaagatgccgagttttatgcaagttgaggagcctgcggagttaggcaccggcggtgacagcgcctgtttgcgaggtttgtttactagctagtagttagatcgtgtttctcctgcttctctctctgctcactttgttgcctatggaatgctactccgtatgttgtactcgtatgcagtcttatatctctcatagagatcatccctgcggtagtcatccctagaataggctaagctttgtgccacctctaggcggatcctgaggatcaaaggggggctctcacgcaggggcttttgatggggccactacggagtacacatagagcccctttatgcatgggccggatacataacttggaatttagagaaccaaaattttaactataaggcgctttgacaatatggataacagggtccagggttaagcaaaggacgggaatttctcaattagcttccagtctactttgtaattgagagaccagcaactagcgtttgtattgtaatcaatataacggaaactagcttacgaaaaagaaaaagaaaagaattcctcgcagcttgttggtgtggccccgaattacggagtactagtcttcagatagcagaaaccttagggtttattcagctctgtagatgcccaacttcagcagattgctacccaaatatcctcttatttgatgattggaccgatgaaggtatgttcgtttcagacaatccatcaggcatcaagtacttcgctcgatgttaccaaatggagttacttttccgagtacgcggctaacccctatgatattagcactcacttgctcacagaccaaatcatccttatcgagttcgggctgcgttcttcacgaaagtgttgctcgaattttcaccctagcttcatattcatcggcggcccactcacctctaggcgaactttatgcttatcgcagtcttgtcaagttcctactcaggtggaacaatgaggtgtggtcccaccaacttctgctccggcacggacttccagtagctcattaatgctgctggttaaagggggtatgaaaattttcagtagattgtgggcgctaagccctgtgggccaagctggaagtttacttagccgcggaggtcaaacttcgggagagtaacaagggtttaatgataagctgaaagggtggtttgaagattctatatcaaaattatagtgctttcctcgttgacgattgacgttcaaattgtactctagctctttctgtccttgctaggctttcaaggtgtttggttattgtcgtatgaaataagctcaaatactaagtagggtgtgatgagaaacatttcaattatgctgtcttcggtgtctagaatgtatcccaatagccataggttttccctttttttgaactttatagatgaaagaatttatatagcaaccgtgccaagcgcctaggaccaccatacatatctggtgttggagcgccccaccaaacgccagatctataaattagacttctcttccaccctgtagatatagaaaaccctccttcatttggaattggttcagaaagagaatcaggtaaaatcaacgataggaaagaactgatcctcgtattcagactcaaagcgactgagtacagcctatattcaaactctttcctgcaatacaacatactgcaagttgtatgcatttacgagttcaagattcttggcatgcaagaagcgcatggcgagtcatgatgtcaagatagggttagcgttgaagccacccaattccataaataccaccaataggcatcgcggcggagttcgaggatttaggagcgcgaaccgtaagaacgagggaaggatactcgttagcggccaaatcgacacgggtgccgttcggaacgaatgcccaatctgcttctttactatataggaatccgcaagttcgttctatgtcgtaagaatcagcccatagatttagggtagccgagaacgatgctacggaatttttcgatcatactttcatgttgtcaacccggtatttttcaataagatagcagacttggcgtacgcgactatgattcgaacatctagacaaagtgcaaggtctgtttcgatctgggtgaaaaggcattgcggaatttcatgagcccagatatattgccatggttggagggtatacgcacaatggtatgcctatcgaattcagctctccgattgtgtcgtcgacatcatgtaggaagtgtgggcgaagttttcctgcgttggggggcacgacaagatcgttcgactccataagagacggagatgattgggatgagggcgtagttgcagtggtctttgagcctcccgaagcagaggtaaattcggcctaaggttaatcgaatcgaggtatgccaggtcatgtctcttgtgacatgccaggtcgatcgaagaaagagttaaaaatcaattcagaatatttatgatgaagatggaaagaagaagcaagtgtagtagatggagcctaagtatcctttatatggtaaattcatacaaaagatacctaacttctagtttggtgtttagtggggcgcgacaacaccagacatgcaccagacatggggtggttggcatttgatagggtcaattgtaatattttatgaattgacatgtcccttcagaagatatatgaataaatacaccattgtatactatgcaagaaaatgaacgaattgaagaatttgttggtgtcaaactttaaaccgttatcgtcacatgacctagtacgataagccacaacgggtttagggcgggggaaactcatttctcttacaaaaaaagaaaagcggcgatagagtcatcgccggcctcttctagcgatcttctcaagtccacttgagagaggcactcgagccactcaatctacttcggtatcaggagaatcaattcatatctcctgtgtcatacttgattgactcattgggagaatccccaatttgcttcacgatgacttctaccgatacttatctcgccatcccgggctctgtcgccttttcccgctctcgggggcatgctattgctgatagcatcggtgtccaggacgtccgagcccagtggattcactatgtgcatactacccagcccttggaagagcctcagcgtgccgtactcgagcaattgcttcagtacggcgatatcacagacatccctcctactttcgaaaccaccgacggtcagtccgataccttctatgttttcccacgcaccggtaccgtctcgccatggagctcccaggcaacaggcatttcgcacgtctgtggcctgcagaagtacgtcaagcggatcgaacggggtatgaagatttcgtgtcttcgtaccagtgcggaggactacaagccgaagtacatggatacgcttcatgaccggatgactcagatcattggcaaggatgagcccgatctgagccttatgttctccgagcacgctcctcaacctctcaagactatctccctccagggtggtaccaagtcccccaaggagattctccaagaggcaaatacggagctcggcttggccctcgatgattcggaaatcgaatacctggccgaggcctatggtccaaatggtgcgattgcccgtgaccctactgatgtcgagctcttcatgttcgctcaggtcaactcggaacattgccgacacaagcagttcaatgcttcctgggtgattgatggcaagcccatgccaaacagtctgtttgccatgatccgcaacacacacaagaagcaccccgaacacaccgtcagtgcctacagtgacaatgctgccgtgctagagggccccgaggccgcgttctgggcccccgatccaacgaccgggcagtggatgcataccaaggaagttgtacacttccttgccaaggttgaaacccacaaccaccccactgctgtttcaccctaccctggtgcggctacgggatctggcggagagatccgtgatgagggtgccgtcggtcgtggctcacgccctaaggccggtctttccggatactgtgtgtcggaccttttgattcctggcttcaggcagccatgggagctcgatgtcggaaaaccaaaccacattgccagcagtctggatatcatgttggaggcacccattggcagcgctgctttcaacaacgagttcggccgtccttgcattggtggatacttccgcactctgctcaccgaaattgatgtgggcaatggtgaaaaggaagtgcgaggataccacaagcccatcatgatcgctggtggtgttggaagtgttcgcccacagcacgctatcaagcacccagatgttgtcaagccgggttctttccttgttgttcttggtggtccggccatgcttattggtctgggaggaggtgctgcctccagtatcgcttctggtgagggatctgctgagcttgacttcgccagtgtccagagaggcaatgccgaagttcaacggagagctcaagaggttatcaacgcctgtgtggccatgggagaaaacaaccccatcaagttcatccacgatgttggtgccggtggcttgtccaacgcccttcctgagctgatccatgactcgggcttgggagccactttcgagcttcgtgaaattgataacaccgaccgtagcatgagccccatgcaaatttggtgctgtgaagcccaagagcgctatgtcatggccattggtgaggagagcatgaacaagttcactgctatcgctcatcgtgagcgttgtggctactccgttgtcggtcgtggcggcggttcgtccgaagaagaaaagagactcattctccttgaccgagattccaaggagtacccgacccccattgaccttcctctctctgtgcttttcggaaagactcctcgcatgacccgcactgtcgattcgcggaagctgaagctgcccgccgtggactctagcctcagcaagtatcttccctctctcacctcgaggacggagattattgatgaggctatcaagagagtgttgtctctgcctgcagtcggctccaagtccttcttgatcactatcggcgaccgcactgtcggcggcctaacagcccgtgaccagatggttggcaagtggcagacacccgtatcggatgtctcggttactgccacttccttggcccagggtatgaagaccggtgaagccttcgctatgggtgaaaagccgacgttggctcttatctccgcggcttcgtctgctcgtatggctgttgctgagtcgctcatgaacctggctgcttccgatcttgtcgttcgtctcagccaagtgaagctttctgccaactggatgtctgcgggtaaccaccctggcgagggcgctgctatctatgaagccgtggaggctgtcggtctggatctgtgccctaaacttggtatcagcattcccgtcggcaaggattctatgtccatgaagatgaagtggaaggatgagacctcgaacgaggccaaggaggtcactgcccccatgtcctgtgtcatctctgcctttgcgccggttggcgatttcaccaagacctggaccccggctcttcgcagcttcgaagaagtaggggagactgtccttatgtttgtggacctttcgttcggtcgtaaggcgcttggcggatcggctcttgctcaggtcttcaacgaagtcggttccgagtgccctgatattcgcgacgttgatctcttccgggacttcttcgatgctacacagcaacttcaagaagtcggaattgtcttggcttaccacgatcgctccgatggtggtcttctgactactcttgctgaaatgatgttcgccggtcgctgtggtgttgagatcatgctcgataacatatgtgcctctcacaataccaaggatctcattgaatgcctcttcaacgaggagcttggagccgtcttccaggtccgcaaggagcatgagatcctgttccgctcatgcttcgccacttgcggtcctcctccgggtctgatccacaagattggacgtatctctcaacagcccaagcagaaccttgcgatctactacaaggctcttctgatttaccgcaacacccgttctagcctccagcagacctgggccaatacctcctaccacatgcagaagatccgcgacaacgcggactgtgcggagcaggagtatgccaacatccttgacgacgccaaccccggtctttcttggaaccctaccttcgaccccaaggacaaggccttgcctatgatggctagtctttcccaatactcccccttcgccaacaagccccgtgttgccatccttcgtgagcagggtgttaacagtcaagctgagatggcatttgccttcaatgccgctggcttctccgccgtcgatgtccatatgaccgacatcctctccggtcgtgtgtctctctccaccttcgccggtctcgctgcctgcggtggtttctcctacggtgacgtcttgggtgccggccagggctgggccaagtccgttttgctgcacgagaacacccgcaaggagttccaggagttttttgaacgtccggatactttcgccctaggtgtctgcaacggctgtcagttcctgtctcgtattaaggatctgattcctggcgcgggttactggcccagcttcgagcgcaacaccagcgagcagtacgaaggccgtgtctgcatggtccgcatctccgaccccgacccatcctgccccagcgtctttttccacggcatggacggcacttcgctccctattgctgtcgctcacggcgagggtcgtgcctcgttcgtcaattcccagggcatctcggctgccgacttcgttcgcgagggtcttgcccccgtccgattcgtcgacaattccacactcaagcccaccatgacgtaccccttcaatcccaacggtagtcctgagggtattgccggtgtgcgcagtgccgacggtcgtgtccttgccatcatgccccaccctgagcgtaccatcatgaacggtattgccagttggttgcctccgaacgccgagtcctggggcgagattggtccttggggacgtgtcttctacagcgccagacgctgggtgggttagatttcttagttttatatttacggagcttttcttatcctttttttctttctcgttctgagttcttgtccatattctctttttgatactggagttgaacatgtcaaaatagcctctcaaataaatataaattgttcaataatatatctgaataccaatccaataaaacacaacgataatatctgaacggagtttatatagagaacctagacctaagggccacggggaattccgcatcgaacgtaaagacgccgagcctctagtgacgacgctgataaagctgatactttttttatagttacctatgttgaaagcttagatataccatcgactaacgagccttatggttcttatctaggcgacctacaaggcctcagctgaatagccggaggttacattcaagtgcccgcctctacctagctgtgaggaaagaagcctaggacttcattttgagacagatattcatgcacgtcgttgaaaaagtcattattgcatcttccactagtacttacgtcaaattttaggtcatataacgccaactccccgctggaaccaaaacaagggtatttgtatcaaagcctacgccaatttcgccgccattcgagcctgtcggcaagaatatcccaactttgcagcccatctgcacgaactaaacttttcaagccatccgtgacaaaggtcgttagatggttgaactggtaattgaccgttttcagctgctggctataggtcgagtcacgaaatgagactgtgagtgtgtgttcgtgatcgtaggcctcgttatcatcatcatcttcatcatcatcagactcgaattcttcttcgggttttttctttgtgcgcagcgccttcggattctccagatattggtcttcatcgccgagcaagtgcgcggtttgtagatctgcgaaatgaacacacagatctaagaaatggatgattgcatcgtggatatgtgataaatcttcagaaagaagacactgggcttccaaagaggacatgtaggattggtgggcagctatcatggcatcgacatcttgtgcgccagatagatctttgtgtagagattgggttgtggtggttattacgagataggtcagatggccgtagatgagatcgaggacccagagcatgttatgatgtagagcgtgtaccaatgtgtccttttcgtcaggtgcgatgatacgggcgtcgcgaatacgctgtttcacaatggcatatttagcgcgcctgatctgcatcaggaaggtcgagattcgttggtatgcctgtattgcgtcctcggtgattatgttcgcaataggccacgggaggccataatcaattgagattgcttctagaattcccacggtccgatgatcattttgagaaactcgcaatgaagtactagcaggccgcacaaggagtcttgatacgtcaatgacggatattgaactgaaagctgtccttgatatctcagtgagcaggaatctgtcgtcccaggaacgaccccgatcgatcaactcaaagatttttgcgtcaacaatgctgatggcgctcatgtctttggcaaggtagacatgttgaagagcatcaagggaggtccatagtccgcattgttggtcgagttcagttcgtaataagctagcactgagtgaatggtccacatccacgagtttttcaaaagcagactctactaatgcggggaaaggaagtaataatgaagaatcctggcaatagaagtcctcaaatttcatggcttcaatgtctggtagcgcatttagatggcggagaaataccatgctctttcctgcagtgaagactttctgcacaccggcctcgagaaactgggggatcctctgctgcctgtggcccgtatcaagcacaaaccagtcatgccaaagagtccgcagatccccattctcacgatttgttcgcacgaagaaagtgctgtccgaagcatcgacctgacctgtttccatccagagtcggatcgagcttgaatatgttttgaaacacataaaaaatagctccgccaggcgctgagacgaactttcgtcgccaagggcttccagcatgcatactaagttgtataaggaatcaaggcagcacattggttgatcatttgagtttctttctaaattggcgatcatgtctgcgagcaatgctagctcatgagagtgctgacgaacatcaacaagaagctggatgagactgacagttgaaccgggtgaaaggtatttgcactgaacttgagataagactctatcaaattcaaggagacgctcttctaagctccggcaaaacgtttgcatatatgggatggtctgtggaagcttggtgaaataccgtacagcgttgagcttggcgcctatctcaatgaaacactgcaaaagcgatgccagggcttcgttggatgaatgtgcgagtgtgtatcttcgatccactccaaaatcatcgtccaagcgcacgtaaatagacgtgggaaggccctgaagcatgaagattgtctccctagcaagctgggattctgtgataagtcgcgaggtggttgcttctgcttggggcaacgaatggtgattctcggctctccaaaattgggccttttctatagaggcaacaagatcgccatcctcttccgaaacaaaaacgtcatctggaatgatatacccttcatccactgttgtggcggattgaggtctgtccttgggaagagatacatcactggcaacggatgaaaagtcgtcatctgatgagtcgccagcaaagtctacttgttcccaaatttcttcgtcgctgaatgccgtcccagctgcatcaaggtccgaccaagaaagagtctcttttgcttctggtgccttggcccgttccttcggacgtttgaccgttgacaaaagagcggggcgatctgagagttgcaataagagactcagaatctctggaagccagggcatccggtcgctctccagctccgcaaggcgggcgtgaagagcttcagcaagttcatctctattcaagatttgaaacttttcctgtagtccctcgagttgcttggcgactgcaaactggtcggtgcgcgtatgagaaccagttcggagcgctccttgtacacggcgcttcagactctggacacgtgcagacccctacttagatatgagtacaccgggtgtgacgatatgagattgatggaaattcaatatattaccttgtggtttggtgatatcttagcgacagaagtgattaaggcgtcgataagcgtactcagatcagccgctagagccatttcaagacattggctcggatccaagatccaagataaatcacatcgagatgtctctagacgtcatagagtgaagaagcattgaagtgaagagagacccggctgttttacgtggatggcactagtcccgatgaggtaagatggccactcttatgcgcgcctctctctctctccgaccatctcccccctttaagcacatacaatcatcatggctatcgcgcgtccgattcgcatgctgggtgcagcatgcattcttctttgtctatttcttgtcttccaattacaccagagctcctctgaagaagggtccaagttgcctcatggcatgaaaaaggatcctcttgtagatcgtgcgtgaccccagtttcttgctacacctcccacaaccatcgcactctaagtgccatactaactgatttgatagcgaccggcgaaccggtaggaaacttatggcgagcggacgaacacgattactcccccaacagcgaacaatcggcccgcaccaatgctgcgctcattaccctcgtccgcaatgaggaacttggtcagctgctctcgacaatgaccgacctggagcgaacatggaacagcaagttcaactatccctacatcttcttcaacgatgtacccttcaccgatgagttcaagcagaagactcaggctatgaccaaggccaagtgccaatatggtacgcattctagtccggatagaacgagaggaaccaaacctaactttatatgcagaacttgtgcccaaggaacactgggacgtcccagaatggatcaatatggacctcttccgcgagtcggcaaagcttttggaggaacaagacatccagtatagctccaaggtctcctaccaccagatgtgtcgctggaacagcggcatgttctacaaacaccctgccctcgaaaactaccgctactactggcgcatcgaacccaatgtcaagttcttctgcgatgtcgactacgatgtgttccgttacatggaggatggcaacaagacctacggcttcaccatcaacctgtacgacgcaccgcagagtatcccgaccctttggcccgaaacccagcgattcctcgccgccaacccgtcgtacctcagcgacaacaacatgtgggagtggattacggatgacgtggctcgtcccgagcacaccaaggccgcgaatggatactccacctgccacttctggtcgaacttcgagatcggtgatctcgacttcttccgcggcgaaaagtacgaggcgtacttccagcacctggatcgcgccggtggattcttctacgagcgctggggtgatgctcccgtccactccctcggcattggtcttttcgccgatgccgccaacgtccactggtaagtcacatacttttatctcatttaagaaccctcactcacatgtatctccactaggttccgcgatatcgggtacaaccacatcccgtatctcaactgccccaattctcccaaatgctccggttgcaaagctggccagttcttccaaggcgcagacttcctttccaaggaggattgccgacctacttacttcaagtatgttggaacgcactaattatcatggcgtcccgtttgagctgttctctcgtctcttgtcattctggagagtgcctcacgactcgattcttgcatcaccttgcatacccctatgactttattcctgaatatcagtggcttggtacccggcgtttgagcggacacatacctgtgtgtattgatgattttgtgttccccatttttccctccctgtttttgatttaattcccttgtcacgaaatacgttcttggctacgttgctgtcttctggagagctacgggggccttgtctacattgtacttatatcgcttgggcatggtcattggtggaggctctgtttatttcggtctggtgcctcttggcctgcttgttgcagttgtcattttgtgtgatatattggctacttaggaacaaaacccgagtcccaacccaacctggctattctactattttgctgaagcaatagaccttggataaagtataaaaaagttgataattaaggaatgaggattgaggatcgaggattgaggactgacttgagcggttgataatacaacaatatgactgaacaagatggaatcaagatagattaagcaccaaccaaataaggcacacaagacctttttccatacaacagcagcactaacaacacgagagatctctaaagtatgtatacagttttctcttctacccgacctaatcctcagccagtcaaacggtgctggctaaacaacgtgcgagggggtactgtttgtttaagagaaaattgacgtaaaagtagaattgatgaggggaatttacgcctcctcggggtagagctcctcccggagagcgacgcccagctcgacgcgcagaccctcgagagactcgaggtattgcttgtactggtcggggttctcgaccttggccttgacgcctaatcacgaaggaatgttagcttgggttccatgacgaacgagactagtgctccaggataggatgttgcggaagcgtaccctcgaagacgcgaacagcggtagggaagtcgttaacacggcgggcggccttgagggcggcggtgaggactgcgacggagggaacaagatcgtaggcgaagcagttgttcaggttgcgctgtttgcaaagacatgcattagccatttgtcgatggtgcgtatataggagccgcatgttgagtgatgggtgtggctgatgccatgtatcgcacgccgatcaatatgcctcgggtgaagtcgagataagtcatacctgaagctcgaaaacgtcctgcacaccatcgaattccttctcgaatctgccattgggatacacggtcagcatgagacggccctatcatgtcgagacgattgccgatggtcgttccgggaagcgcctaacatggaaatgcagggcgctggtgtccccctcctccggcctcaatggcttgcgattgggggcgtacctggcagtgaactcttcgtatgtctcatcctcgtggccggagcggagcatggaggtagtaccgaagttgtgggcgcgagcggcggccagagtcaccggagactgcatccgggaccgggtcaattggggagctctgaaggagccggtagagcgagcggcacgggtcgccacgcggaagatggatagggacgacattttcagaagggaaccacggtggaccggacaggaacaatagtgaggggagagaagtggatgggggcgggaaggggaggtgttgaaatgcctctaggattttgcgggtggtgtggtgttggcgcctgaggcagctgaacgggtgctgagtcatcatccgattggccccgttccagtgttctgatctctaagggtggccgttgattggctggagagttgtcggtttctacatgcgtgtcattggtcggtgttaggccatgacaagtcgagttcgtataaggttattggacttcttgttcatattgtaaagatatataacataccatgatggtaattgatgttcaagatatattgtgactcgattgttgtgcagaccggtagataatgattcgagcaattaactccaatatttatcgattgtaaatcctacaaactcaaggagggtgggcaagaagataatttgactacatacatgagtaatagtaatatgagtggtggcttccgagtagagaatagtgaaaattcgggttattatagccggcaacatctgaatcgaagatcttgatagcacgtgaagatagaggattgacaagtaaacaacgtagatattaatctacacttgtttagtcggatatgcttctatatcctgtactgtgaaggtgacacaaggtagaataaacgacctctatcactccgtacccctgtcaagctactgccaattgaaagcttctaatggtaatcaattgtaacccaacgacaaatgactggatttccaatgcaacgcttcggatatggacgtggaaaacggagactggaatcataatgcagcattagctatacagagtaaagtggtcaattgcgaaagatatgtacatagatcagccctcgggcttttatacaattcatttctttgtataatatataatgcgctagttgttggcatttacactagcatgtgattgtttcacaccaaggacaacattgcattcggcaacacagtactctgtacactatattgtgatctggggtatcatgaatcgcaattagatctaattctaatagattgaatctactaaatattagatatgttcggacaatatatccccagtcgatgccaccgggacctgatcttccccttttttatggcacgctaaacccttttgggccctcaacggacgcgccggacgcaaaaagtcactgttctcttatttctccagctttctccctctctcctcttcccctttcccactttcgtttctttagctttctttcatttcctttccttaatttggcctttctttgttttggcggtccattgcagtcccattactgccccgtcaagaaaagaacaggttgccttcccgggctatctctatcttcaattctacatccatttggtttgagagaacaacccaataccctcacaatggcttccgaaatccttaaatatgtcgatgtcccgactctcgatcgaccctttggtgtgcacctgtggcccctcttcgaccaggcctacgagaaggtcatggggtatcccgccagcaagttcaacttcaccgagggtgtgacccctctgtccaccttgaaggagactacaatgatgcttgtcacctactacgttctcatcttcggtggccgcgaggtgatgaagaagttgcctgcgttcaagcttaacaccttgttcatgatccacaacctccttttgaccaccgttagcgctatcctgctggccttgttcattgagcagcttcttcccactctctggagacacggagtcttctacactatctgtgaccagcagggtggttggactcgccctctgatcattctgtactacgtaagttgcgaagcgcttgaaccgggagaaaagaaactcacaactttgattagctcaactacatcaacaaatacgtcgagttcattgatactatcttccttgtcctcaagaagaagccattgaccttcctccacacctaccaccacggtgccaccgccctcctctgctacactcagcttatcggtgtgactgccgtgcagtgggtgcctatcaccatcaacctgcttgtccatgtcgtgatgtactggtactactttcagagtgcccgtggtgttcgcatttggtggaagaagtatatcactatgctgcagatcctccagttcgtcattgacgtcggtaagtcgttgcaggcccggaacctgcaaataacagaatactgacagtttcaggcttcatttacttcgcctcgtacacctacttcacctctgcctacttcccgtggcttcccaacatgggcaagtgtgccggtgaggaattcgctgccttggctggtatcggcatcatcagctcctacttggtcctgttcatctccttctacattgccacctacaataagaccgccaagactggacgtccccgccgcaacactggccaaaaatcgttgatcgacatgaggaactttgaaattccttccccggccggtaccaagagcgccaagtccactggccgctccaacggccctgtgacacgctctcgcaaggcctaaataatcaagtgaaggacgttcgtgtttgaatgttttcagtgtgattgcaagaattgtgctcaagagtttgatctttgaatcatcttaagatgagctattggatctaaagttcatccaatgcttgtggccaaacaaagcagaagtgcagaatggctgctctagggtgatgcgtccctatatttgttttaatgaatgaccactcatgatgccagattccattacacccgggcatggggtatgtgcctcggagttgtcggaacgcgtgcgccaaaacttttgtcggaaatcctacaagggaatgctgttggattaccctacccagcggtctcgccatggttgtattttataatgtcgctttctcttcttctgttcatgtttgtcgttatcactccccgtttggtggcaggccattggattatacctttcgccgttattgttattaagtattgattgatagacgttagctcaaaatatcaagataaatgtaatcatgtttgctgaaatagtgtgatagattggatagataccttggtcagataccgaatggttcgcatctccatccagatccggtctgtatctcaagagacaataaagccaaaccgcaaggttatccagctccatttgcctcgaatattgaaagccaaacaaatacccagcctgttgatatggcaacagaaaagttatatactgactctagcacaatgtgcagtatcacactgaagactgcacagaagaaacaaaaaacgcaggaacaggaaccgccaggtggagcttaaatgcgcacatcatggcctgtgcgacgaggcacagacagcgccacgaaagtgatgtatcgcatatgccccaggtaacagggcgatcattgacaatgcgtcgaatggagaaacgggcaaagccgcagcctcgagagaaaaccaaagactcggactcgaaaggcgaagagaagagtaaggcaggctacatccagcctccggggttgaaaaagcggtgccagccattgatataatgggggcgcaggttcaatagaccagcgccagagacaaagtcaaaggcgggaaactgtggatttatttgctcattgcctattctcgtcgaaaagttacgagcgccttgcttggatgtcatgcgcgtggtttattcggagactggatggagatgcggggctggattttgccgtcggagcatttatgtcaattcgaaatagaacagggaaaaaagagcttggatatgcagtggtggccgtgctgacgttagtgaagatcggcccatgaacttccgctgccctggtcggatttgaaacgctttggatatgaagacggagctatggccgaatctttttagcgtcaagacccactgggtacggggttggttggtctgcaattaagttgaagcaaatgtcaagagtttgacgtgcagaggcttgggttaaagtgtatgcataaaatagggaatatcgagtccttgctggtgcattggtgtatttttatcgtacaacatagatggggatatggtgatatgacgatgtatgatatctatgacagacgagagttaactagctgtaaggagaatatagaggaccatagctgttcagcgtcaccattccaatccttcagtgttgcgtatagcccctgagttcttgaatttaccaacgccaacctcaagccaacccccctcaaggtcagttacccctggcatcttcgcaaggataattttccgtttactcaagtccctaagtgcgtttgagttatacacatggccccactgattgcctgttcccccactatcggccattccacaactgttcaggtcgagtagttctagggaatgcttcgagggacatatgtttcatccggcccttattctcctctttgccactgtgtcgtacttccttgatacgagttctcgtcttgcataatctctcaagccctaaaaccctgatacgcagaaatgcccaatcattgaacaaacgggggattaggtgcatgtgccctaaccaatagctcatagtgatctatcagatgacttttttgatttttttcccccaaagtttcaattcagtcttccggccacgatatccagtgtaacgcgttcttccccctgctgaaacgagcgccatcccgcccttattttcccccatgcaagggtgagacaccaatcacaatccctcctcaaccctcttcaaggttcactacgcgctgaactagcaaagccagcaaaaccagcaaattcagggttattgaacctttccactttctgcacgtggatgtcgtacagggccatggcatggattaatgaccctggatgcctttccctgctactgactccgtacgccgtacgccgtatattggtttgatatatgcatcccctgcccatagctccttggtcccactccggtccacttccttaaagagcccttttgtcgccctggtggatttttggatctcctttgcagctgtgcacctggatacttgacagctattacgttccgttccttgggcctccttttcatcttggtattctctagtcgagggtctttttagtcttgcatttcccttggcttcggaacggtctgcactttggaacagatactctttcttcctttgctctatgaccgattacaaccatatcactgctgggaacatgttcggacctactccctcactgagtctacaccgcttgagcaggcatagcatccaggatcgatacgagtcagatgaggaggctgtgtcggaatccgacacaggcacccaggatctactgtcctcgcctgtgggctcacgagtcggaatcttcgattcagatctcagcgccgacgagaattctcacaatgaccctgattctgatcgggatgaacgtattctcgctccgccagcagtgaaacggccccggcccgtctcttctgctaccatcaagagaaacagcaatgccaccttcgacgaagatacgtatgtgtttgatctggaagatcagatgtttctcgaactgccaccctcagattctccgccacaactggcatccagcacttttttacagccatcgatatacgtctggcccaaaccaccccagccatctaacccaaggtctcgctctgcttcaccctcgtcggtcttttccgtagaggaagcggacatccgggttgcaaaggaggtgactataatggagccccggactcgtcctacagtggtcttgatcaaagccctaggcccacggtccaagacctcaaaatctcgtcctcattcccgctccagggaaagcagccgcagccgctctatgcttgccaggaccgatagccgccgacttaaactgccacgctcgtcagacccagccaagtcaccacgagcatccgagaaaagagccaccacgaagcaggcgcccaagtcagcagaagatccccagctcgcacccagcgcaaccataaaccgcatctctgaaatcccccacctctacttcccagcaccaccacgcaccctcccagcccaagactaccgaacccgaccacgaactcaaggctccgacaaagcaatgcctccaccaccactgaacctgcacgtccaccgacccccctcaatgcgcagtacaagcagcaacagcgtctccacttacacctcccgcccaacaacacccttctccgccgacggcaaacccaacaattacaactacatcgacgcaccctcccccctcaccagagcctgcagtccggcctcaatcccaccaacgccctcatcgccatacttgtccaagcgcagcgggtcctcgacatacagcgtgtcgaatatgctcacaagccgctcgcctctgatgatgcgtcgcatgacgaggaaacactccgcctccagcgtttactcgctaagcagtctgcgctccgaggtcggcgttaacggtccttcttcctcgcagatctctgtcgcaacacaacccaccccgcctcccactgctgacagccatgtcgtgcgcaagtccagtcagcgtcgccatgcgcggcataatagtgtcctgccgagtgggaggggctttatgggattgaagctgggaaagaagtcgcataaggcttagagatgggggtcttggctttttgatttttgcttttttgctttctggtacttaacatatattgatctggtaatgtctttatgggggatctggcgtatggcttggatttctaggggtttgttccggtgttgtttgatattgggcgtttttttaactggtttctttcggtggtcgcttgattttttctgtcttttccctctcatctctgtttttgatcggctaagctaatgtatgacggcccttgacttaggaaagggcagaatcaagtattattctgggatggctaatgtcttcaattttggcgcatggtatgcgatttagagataactattgggtggtttagttacatagctaaatagatagggagacttctatcagatgcagtctgatattggagtctacccatacaccctgaacacaatgatcgtgttccacccaagctcctagtataggtatcttatatcctcggaaccgcgtatcctcagcttatatactctaggatgtggagaaagatggtctttaatctccttgcaagcatacacatggagacagacttctggcctcccatcatttccgtaaaatgcaagcgataccatgcgtttgagggaaatcacatgtcttgccagcgtacaggaagcttagcaaggggtactgtaccctttttttggcagcatagatccggaaatcggcttaacaagctggatgtagatgaattcgataagtgcgaatattgccaacttcacctcgagttggggatgtgctacaacatatgctactactccgcactctgcacaataagaatcgaggagagtaatcgaggatttagtgttgatgtgacccactcccccaatcgatccgagaccggaggattttatgtccgctacgttgtacaattgtccgctagggattcggccgagagtccgttaaggcaagatttggccgtaaacaaggagcaagtggattttagtgggagcctgcttctgcgcctctagggcggctttgatggttgttcaaaaaacgaattagcactattccagggatagtaagcggcacaaaacctcctcccacgatgaacagtctaccaatgccgaccagctaagagtagagtattgaaggtctgtgcacgcgagattcggagaagatccattgcaaaggaggtcacgccacgagccgtaagtgcctcgacgagggacttgttccggaggggctagataaaataaataacggtcgagactttgcgtaaagatgtccatattaatatatcgactcttcttctctggctatgggtccgagtctgagttcgacctccatctcaaacctctccttgccgtatggttcgtttcgtagcgtcgctatttggtctgtcccaaggggaaagtccgactcgaatatcggctcctctgcccctcgcatattagcgagcacgctttgccggaagtgccatcgatacgatacgtacatcggggtaaatagaaaacgcatactgatcaaaacaattgtgtagattcgaagtcatcagtaaaccgttttgaatagagttaatcttcgaaaccctggcatatggtgcatatttgttatctaacgcccgaagttatactcaacccatagaccctccttctctagggggaatatatgggcagcttcgaagccagtccaccaatccgactgcgcaagaaggttgatcgtgccggaaataacgcatctcccgtctctccggccgacctcagtgcgaaatgactcttcttgacctgaatgattaaagccacagacgtgaggaaaccacgcttcgtctgctcacagtttgacaaggaactcttacagtaacgaaaataaccgtatgctatacgtgaagtcttgacatcacaagaaatgtcatagtcgccaggacaacgcaattaattattcgatggtgtgataattcgaccggatgctcgatcctttatcgtgaggatctccgccgcaactagcaacacgttctcgagaatccagatcagattagcgtccgttacggaaccagcttaaaaggaacctcctaggagctgtccgttagacgcatcgtagaaatggacattgcgcaacatgctcctgactgacgacatggtgagtgtttaacagatgcagatctcctaagggattgacatagtgatgaaggaatcgatgagggcgaacttgatgtatgaggtaggtatgcgataaggcaacgatatcaacacgtgacactaagcccagaataagacgttgattcttcttggaggttacgaaaggaaagatgttggtgtaatgctgttgtatggggcacgtgcttgatcacgtgctcgtatgaacagggatcttgatgcctgaatgcctgaatttccagatttgtagttagttatgggatcaaaagcttcattttatgcaggggaccgcttacattgttacaatagatgtttctcgaggagttttcttgggtaattttttggtagtcttttgaaaatataacaattttaaatagctataaatagctgaagcattatatagtctaagcccgaaagctctctactgcaatctctaaggcattatgtgcccggtaataggaactggtggccaattacaattcgtactccacatcattgaccaccactcgtttcaccatggtcagtagagccaacttcatccacggtcgcctggacagcgcccttactatcaataaagtgagtgatgcggtctcgaggaagccaagcactctctggcatcatgaagtaggagatcaatgcgaagatggtgactccagccatgataatgggggcgtctatcaagcaacttagttagcgcgataaaaccttataagaaagaacatcttacaattcagattctcgccagtgactgggaacacgtagggcgagaacaggacagcgacaacccagccgttccagaagacaccaatgaactggaacggcttactccagcggccgagactccactgtggcttcgggaaccgcgacggagtgcagaatagtcgacccagacagatcagaccgtaggcggcagcgctggggacaccggctgccgagacaagggaagtgaaagccgtggcggatggaagaatggtgcaactgactagggcggcgacaacccagacaacaataactgcgttccgtggctgaccgtcctttacacgagagacccagccggagaatgggagtacaccatcacgggcgacggcgaagacaaggcgagaggcggcgatgatggcaattgcggtgttctgagaatgaaagtcagttgtgagatatgagatacccgtgcacaaaatgatagctcaccagccacaaagcgaaaatgcaaatgatgttcatgaagatatggccgcccttgcctagaacaacagcgtaaagaggcacaaagggttggggcccaccgaaacccatgagtgtgtcggcgtcgggctatagaaaaacaaggtcagaatttcgaatttcggcgttcgcaaagacgacgggagacgaacagcgcagaacaaaaagagaataatcgtagccaaaccaccgaacccactggcaacggtactccagaaaataccacgcgcagcagtgatcgacgcattcttggtttcttccgcaacgtgacccgaggcatcaaacccaatcagaatgccagcggtagcaagataagaaagacaccagttccagccagccggggctccggtaccgttgtacgtggtcatgaaggcctcgtgggtggtacggaatccccaggtttgagcggtgccaatgggcagccagacaatgttcaggataaagtcgagcatcacgactgcggaagaccaccaaaagacatatttgaaatagcgagctagaatgctgtcagaggtgatgaatcaaagttacgcgtttgtacatacgaggcaaaaagttcaacagggcggccagagcaagcaagatctcagtgcagatccactggactgcgcggaacttcacgctgcttgagtctgatgggaaatcgaggttgaatacggttatttcctaaacgcaatgtatcagtctgaatcccgggaaaccaagaaagaaaaaaagcataccgcaagcatgtaattcgccgcagcctgggtgttgcctataatcaaattagcaccatgtaatccttgtcttaaggtagatacgcaacatacttgcacagaaagtcgtccaagccgttgtactccaccaggcgacgataaagccaagcagtcggccaaatcgaggcccaccagcttcggcggcccacaagtagattgacccggcagacggagaagccgaacagacctcggcgatgacagcagcagtaatgaacgtgaataccatggttactaggtaactagtccaataggccaggtttccaccggcggcaataccagtgctgaaagtaacgcggacaccgccaacaaagtacagagcagctagatagagtcagtataaatgcacccacaaagtagtgacagcgaaaaacgtaccgaacgtggttgaaaaattctcgaacaaagtgtatgtccgatgaagaacctgtttagtgaattagttgctgaccacgagacatcttaaatctacgattcgacgtactggcttatagcccatagtttcctagaagatttcatgttagtttgatgtttacaaaacaaggcctggatacacctaccaataaagcggtatcatcctgtttcttgagctcagcccggtcaccttcaccttcatgggtgaggaggtcggcggaaccggcgacagggtcgtgggaagccatatctgaatgacagatatatagggaaaagaaagaacccaggtgtctgtattttctggattgagaagagatcagaaattttgaggatagactttccaaggttcgtgttcgtcctgcggtcaaaacgttcgcaaatgctccaccggaaatattaggagacgccacagccttaagtggatttgatttgatgactacagatgacctagttgggtaactggttaagttatgagtacagtaatttatcaagtgtattatatatattattatatgcctgtcttgatcttccttgaagattattcaattgccgcgcatcgcgtaagatcaaaattttttggattaagtttcaaagagggtccaatataaccttggaagctcggagctttctgatccgtcgagcttgacttgtttattaggtagtatataatcttgggggtttaatagagaagatagatttgtaaaggctatcagttgttataattattcccgtacacagccgcttccgttacacggactagaaggccgtttttggtaattcttagcctcgtgggagatgtttcacccctgagctaagactactagcttgccttgttaaatggcgatatattgtgtacctatttgtcaaatactgtcgttataccaggttatggtgccacacagctcgtggtcataccattcgcaccggggtgaaaatgaatagcaggtaagctcccatctaaggggatatgtattatcgcttttgataataattcaggggttttttgctcgattaagattcgtaaatccaatgcccctcatagcaaatctgataggccgatggcatcatatcatcaacggaacgaacaatacagccttatatcgacgcataagaacggtccgctaatatccactgatctcttagcagattgtgaatatccgcagtgcaatggaccctaggatcctcaacagattccattcctattaccacaacttaacaatctgggaaagaggcggcaaggagacatttaaggtatggacgaccggtacgggaactgggcgttattcctcctaagcaaaggtcctctcgtcctgctggctttggcattgtttggagacacgtcttttatcaatggcatcgtcaatggtcgctctctcgattctcattgcggttcatctttttgttcttttcttccatactgtttgggtgccatggctgttccttctaaggttggactggatccctcatgctagctatggtgatggcggcacactaagatttctgtctacaaggaactggttgagaaggaggaattaatcgacatatttacagggtctgtgggcgacacggaggctgatgcccttgtcgggagacttgcagttggagctgatgctccgttaagacgggaaattttacgcgctatgcttttgaaacaacagagtacccagatgaggagagaaggaagcaaactatacaaaccaccgacctccattgctatgcgaacgcacaaagaaagaagcaaacaaagaaacaatctcaatatgacatgtgatagcatgtgacaatgcaattcatgacagaaagtcaggtattggaaggctaggagcaataacaacaataagagacaacaacaagagacagcgacaagacacaacaaagtagacactgaaatgaaaagggaggaaccttctaccctcagattattgtttcatcattgggaacagagatttatccctgtaggaaggagatgagaacagagccccttttgttaagctcctaatggacaatggagaactcagagaagtacagtctgtatccgcagtggtcagagggagagtgcttctaccgtaacatgcttcgtgccattagaccaggaccgaagccccaacctagtttcagccttcaacgagccgcagcaaagttccaatcagaatcctcaggatttcccttcactggacagcagcagacgtatgttgaatacgaatctggagctggcaaaagttcaaaaaattaaaagggtactcaacaggaacacgatgtgcaatgtgggcccggagtgttggagaagagagaaagaagaagagggagaggggggagggggcaggtatttataccctcccagtagcttaaggtaaatgggaaactggggttggtgacggtttttgaccaaaagggaaggcacctgatcggggacaagatagcacgtgtgaagagtcatggaccactatctgctcctctatcaccctcgcattacgaactgcaacctacatgtaccccctaaagctcgtacatcggatgatcaagggtttttcacttaattcatgccatgcgccatggtgatgctagaggctatgatcatgaggattatattatcattttcctggtctatatatacatgctgcttcatatatatgctatgatgcaggggggctaccagactaagtctttagctataaaagagtcaagttgaactcatggggtatcaaaggaaaagagaggcaatatatgcatgatgacatgtcgtgaagtcgcagagagatgtcgactccagccagcttcacatcagggaagaagaatattcgtctgaacttcctctaaggtctggatccaacctccaggaaaggagcgtctcttgagccagactccttctagggtctcgagtgctttgtcgacgttctagattatgagatattagcattcggacccgcctcttgatgaagttcatttgcgacataccctgaaaccaaaccgtttcaactcctgcatagtttggcgaacaaatttctgctcgggctcactccgagtctcctgtccggcaatgaaaagcggccacagaaaagccaattggcccacatctttcggcaacttctgagctagtagaagaatccgactaacaagcatgtccatatacgtccactcagtgatccaaccgacacgcccagctccagcgatctgaagtagatgaacgaatgtcgccttctcgtatgcttcaatgcaacccgcatactcaagaacgtcaggatacggatacagagaaaggctctcatcatccagctcggcgggcagctgtaggcagggcggggtcgtaacacgccatacaaccagctggttgaagatgtctttatacttcgcatccgactggtcggttgtcatccacgttttcttgtctgatgcaaatgtactgatagctgcttgcacctccattaggctggaccatgcctgccgcagctcaaccaggcgtgggttgtccgggatcgttgacaatagacttggcgtcccgagattgtattcccaccctccacccatggtattccagtaattaccctcgaccacagtcccgccgggagtcgcgcatgaacctgccacatcgagatatgagagtagggagacgaggaatgggcggagggggtggttcgtctcggcgacgcgttgtacttcacgtgccgagtcgccgggttgcggatagaagaggaggttgtagatttcgcgagctcctttgagatgtactgcccagttgttgtgttgggaatccatcatctgcaggaatattagtcaattgatcatggctagcagatctagaggggaaacgaacctcgaatagggaaagtaataggcacgtcgcgaaatccgttaatccaagctgctggctggggtctgagtatcgtgcacgaaaacccttcactaccacgccgtatttgcccattgcctgctggaaatgcctattccgctgcgatcccaccgatgtgttcgcaagatgtaatgcgcctaatgcctgcatcgcattggccatggttggagacgaccgcgcgaaatccgggaaatgtgtgcggtagggattggcattgtgaggggtgttgtagatgatcaagaatgttgatacctgatccgcaaaataagtgagataacgctcttcaatgcgctggatcgatttcgcgatactgatcgaggtaacaggatgctggaagcggaacttcgttgggtgtggcagcgttgtgggggcgaccatagccttgcagaccgcattgccaacatcttccctctcctctaagggggagactgcaggagcgtcgcttgactctgggctggaggtcgaatcgttgttctgcgtcttcggtgccctggatgactctggcggtggatccgtcggtgtctgagagggcccgtagaccttgaacgtcatccgcccttgagcgccatcgcactcgtgtccaagacggacacagttattacaggccggagatgcctcgtcgcaacgaacatggcggcggcgacaggtggaacagcctgtaaatcctcggtgatgccatcggcggactcgttttgggggttcggtcggtggtgtatgtgacgtgtccgacaacggtgcaccctccctgcgtgtctccatcgggcgcgaaactcgaaagtaggatattgttcagacatggacacttagaatgaaggcgaatcgacatgaatcatgatggatgttataaggagaatccaaccttggaagtatctgggtttggaggggcgctgaacggcaaaacgcatcagctcttggccaatggcttttcatttttctatattagaatgtttcaaccaagcacatttatacccggttttcttggcccttaaaagctcttggctcgactctagcgtcaaggcatgtgcaggagctgaacatagcgctgtgctattctagttggctgttttgaagatactacagaatcaaagtggaactcgaaggattcatctagctccaatctagaccaatacataacgtaaccagctattgaggaatcccatcctttaaggggctgtttgtgtatgttaaccattactggttactccgtagaggcatcgaacttgagagtcagtttcaaatctaattgagaatacagactcacttacaatgcactgttcaaagggcacgctggagttcagaatggcccccatggccgcccgggcaatcgtcagtggtaccccgatatgcactgcctgctgctctgcctgttggagaacggcctcattgcgcgagggaacgttcacagaagcccgggtggatttgaaacgagttgcctcacggacgtatgcggctctataagagttaatgtgttaatgtcaatgtcgtaaataaacatttcaagtcctgctcagggacggaggtcggagtacaaaccgccgatttaggagctgaagtatttgatcgtcgatatcatctagcgcggttcggatctcatccaaagtgttacagcacgtagttaacgtgccatttaatgacgaaaaatggacgctcggagtgccccatggcaccgggcgatggtctgctgaaggtgctgaaatcacattggaaccatagcagttcgcattggcattggcattggcattggctgttgaaccaatagcagtggaaagggttagaaaccccaaaagtacctggaaaatcatgataacaagttgttgtaaagaactttcagggtaataataacaataatggcaacccctcgttgatcgcctgccctaaggggttatgatcatcatgggatgttcatcaatacgatatttcaccaaagatatacttcgccaaccaatgcggggaaggtaacggatttcactccgagcttcgtgccgaaacccctcttcggatgtttggaacttatttaaaagctcttgcttctttattctgacttctactgtcaattctcttacaccaagatgtcccaaggttcaagactccaaggcaaggttgccatcgtcaccggtaagactgttattccaaaccactccgttgcggatgctaatattctcttttcaggaggaggtaatggattcggtgcagctatcgctcgacgattcggcgaagagggtgccaaagtgatcgttaccgatatcaacgttgagggcggcgagaaagtcgcctcgcagaatccttccaacctcatctttcagcgccaagatgtcacacaagaagcggactggaatatggtgttggatttggcattctccaagttcgggcgagtggatgtgttggtgaacaatgcgggcactagctatcgcaacaaggtgggttcaacatattgtatgaggggacctcgctaatttcctttagccgacagcagaggtcacagaggaagagtgggagcgtgtgtttaaagtcaacgtgaagagcatttatctttctacaaaggccctgatgccgcgtttcatcgagcaaggccagggtgggtcggtgatcaacatctcctccacgggagcaagtcgaccacggcctggattggtttggtataatgccaccaagggggcagtcactaatgtgagtgaatgttgggactgtgaatgaaaatgattattgaatcactaacaatccatacaggcgacgaaaggtcttgccgcggagtacggtccccacaatatccgattcaacactgtcgctcctcttctttctggtactggactgttttcgatgttcactggtatggaagatacccctgagaaccgagagaagttcatcggaaatgtgccattgggccgactcaccgatgtggatgatatcgccaacatgtgcctgtacctggccagtgacgaggctcgttttatcaacggcactgagatggtagtggatggtggaaagtgtgtttagatatccgagaccagacgaatcaaagtcacaaattaatttctctatcccgatttaccccgcagaaacgtggggtatcacgccatggctcattctatctcctggctacataactcacctctccactatcgccactgatgtgagcccaaaaatgacatccaacttcaaatcaatcccactcatcgacctatccctcgccaactcgcccttaacccgacctaagcttctccaagaactccaccacgccctcacgtgcattgggtttctgtatatcacgaatcacgatgttccacaagacgtaatttcagacctgaaagatgctctccctaaactttttgccctcgatccggcggtaaaggaagaagtggctttacacaactcccctcactttttgggatacagccaagtaggctcagaaacaacagccggagtcgcagataaacgtgaacagttcgagtttgcaaccgagctgccagacctatggcgtgcgggtcttcctctttatgaaaggttgaaaggacccaaccaggtacatcaacctctactcagcccatcagtcatctggctcaaaagttatactgataaaaagtaacagtggccgtcacaagacctctctcttcggagcgtcatcgagagatatatttacgaattaacaaacctcagcgagcgtttcttacgcttggtcgccgaggcactctccctggactccaagactctattctcattactctcagaacagcaccgtctcaagctagttcattatcccgcctcagatcctgtttccgattctaatatccaaggcgtgggtcctcacaaagattcctctgggtggtggacgtttcttctccaagcatcgcccccaaccgtgaagggcttacaggctctcaacaagagaggtgaatggatagacgttcctgttattgaaaatacattcgttgtgaatatagggcaagctttcgaggtggttactcacggtgtgtgtaaggcgacgacgcatcgtgtgttgtcaggtccgtcggagaggtatagtgtgccctttttccagggtgttcgggggagtctgacaaaggaggaggcggttggaactctaagggatcattttgctgtgcaaaatatggcgttggaggcatccgagggtgcgagtgttgactcggcctttttgaggggcaggtatgatacttggggggagtcgcaattgaggacaaagattcggagtcatcgtgatgtagggcgtgtcttttatgcagatgtttttcatgattatgtcaatgacgatagctgagatcaaagattgagtgagaaagtcggccagctggtgagcggacggttcaccatatatattgcaatatgcaatattgtcaaacagaaaaatgagtgatcgcgttaaagtaacactcccacatcgggatattccaacttcatgataggaggttagatcatatttggatccattcaattactacttgggttgactagcacttgctctcaagtgctcccaactgctgtaaatatgtacaaattgctaatcgcaacacccaaaccagaaggatccacctaaatatataaatcatatgacgcgcaatttgaatcaatcagcagaaaatctggagccaaatctctcactcgtggtcactcgagggctcgattttagaatctccccgttcaatagtcaacaccgttggaatagcaaccaacaggctaccggcagttagaccccagttcatggcaaactgagtcatggcactgactccctcggcgtttatcctccaggccatcgcaccgcctgctggcttcaatgccgaataggctccgacaatgacagcatttactacagggtcgcgggagcgagcccccataatccagtagcagaatgattgccaaaatgaatcataggcgccataaaagaaatagagaaacattggtccgaggtattcacttcctgctttgtaatcgatatcctgcttcagaccttgtcgtaaacgctgggtatcccagacttggaaacggtagcctccgccccagatcgccatcccggtgacgaatagtatagaccagccaatcttggctcgcgtgcgacgattgacaatttggaggtctagcatgaaacccatcagaagcccgcctgccatttgtgcgatccagtagagggctccattgagagcgcgtgtgcgtaggttgaatgtcatgccattgacagcgttctgttgataggaatagaaaacgtttgcagtgtagaacatgggatagaggcacatgttcttccagttgaagactgtacgcagtgtctccatcacagttcttttgaggttcgtccagttgacagccttggactcttgagtgatgcgattgccgtggtagtgtccagaaagattttcggttgagcagacaaacaccgataaaagccatccaaagagcatgacaacaatgtaggctacatatgtcgagtctgtcaccgtcccggattttgagttgtagttgagaccaaaactggccagcgagccaatggttgcaccgaggttgaatatcacccaaaataccccgatggctctgccgcgcgtgttatcgttggtataagtgaccatgatggttccttgcgcaacccaaaaaaaggccgcccccaaaccaagaatcgcgccggctgcaatcacgaaagggccgccattcttcctcctgtcggaattcaacagtgatccggcatagagggcataggtccatccgccgatgaggaggcatacacgtggcccgaggtacttgtaaaaggagcccgccaaaagcagtgctgctcccgctgtgcatgcatgagttgcgacgttggcgttggcggagattgtgctgtcgacttggccagagcctcccatgccggtgagtgcattatacattccaggattgcaaaaggaaatcactgaaacaaggccgatctggaaccaaggttcatgatagatcctagtgacaaagtttttgtgcactcgtgggtaaatgacttcggggtcatcgttgtgcggagaaacactatcttctaccgacttggtggccatgatgggataggtagactcgagatagatatattgggactgaacatgtcaagcgctgggcattttctagataagtatatatagacatagaggatgtgaccctaatctgttccagactttgaactatggtgtgctgggcccgcaatttggaacaagcggatctcgcgcaccgagatccgttcttcacggaagcgaccgagatacggagacacagttagacggcattgatttgattttctacataagagcgtcgcttcaaatctcggttgcgtgacccgaaaacttttgctcacgccatgacgccatcagattgcgaacaattggaccaccttcagaccgaggtgcgcagtgcctatgcacactcaatcgattctcttgatactttagacctctgtaccgccttcaatcatgaggagtcacgagtatcttcctcagtcgcgtgctgtctaccggcagttgcatcctttgttgacgaattagtgcctcggttgcgcgccggtggaagattgatctacgtgggagctggcaacagcggccgagtagcgatgatggactgtgctgagatcccggtcaccttttcaaccgatgagggccaatttatcgctctcgtagcagggggtgaacaaacagctaccaaagcgcaagaaggagcggaagatgccgaggaagacggaaccgcgcaactccaagccttgaatcttactgtcaaagacgttgttctcggtatttcggcatctggtcgcacaccatttgttctcggggctctcaaattcgcgcttcaaaccgggacactgacggcaagcattacgaacacgtcgccgtccgcgattgatagcctcggggtcgattatccactagttgccttgctaggcccggaattcattgcagggagtactcggctcaaggctggaagtgcagccaaacaaattttgaacatgatcagtacttgttcaatgatgaagcttgggaagacatatggaggtcttatggttgaccttcgagtcggaaaccacaagcttcaagcccgaggtcgaagaatcgtacgtcaggtctgcaaagagactatggtactccattcgacaagaggactcgttcttccaaccgagattctaaagaacttccatcaaatacagaacgatgacgcagcaaacaccctgattgccagatgcgatgggagcgtgaaacttgcctgcgccgtggctgttacggatctttccccgagtgaagcaaatacacaactacaaagcgtcgatggcgatttgaaggcttttgttgcaaagcacctaaactcgacttacatccacggaaataatgcctcagttgaagtcgatggtgatgatccggaatattttctatgcatcgatggtggaggaaccaaatgcgctgtatcaattgccactaaatcaggtgttgtctctcgtggctatgccggcccctgcaacttcaataccgtggctacagaggagctcgtaggccaggccaaaaaagccacgatggaagctgtgaggcttttaccgcggaggcgacattcctatctcaccaattacccccgattcagcaaagtatgggccggaattgcaggcatacaccatgccgagaagttgaacgtactcatcaatcgtcttgaaagggcgtttggcgtttcgatggagagcggtacgctccgattgacaagtgacggtgcactccttggcgcgtgcatcgagggcgatgcctctgttaaaacaggcatcagtctcatatcaggcacaggctccgtagccactgctttcagaaaggactccgacggccatgtcgtcgaagttcgtcggacaggcgggtggggccatcttatcggagacgatggaagcgctttttatattggcaaaaaggctttgcaagccctgctgacaagcatcgattccagcgaagctgacgagagctgcttgagtgaaatggagggggaagtcctggcccatttcggctgcaccaaaaatgccgtgctatctcgcctcctttattctggaaaaaatccgaagagcgacatcagccatcttgcaaagattgtgacaaggctggcttttcgtgacaaagaccctaatctccaggctcttgaaattctcaattctgcagccagctcgctagctcaactcattcagccgctgactgttacctgccctccagccagaagcgtgttgatcctttctggagcactaatgggcgtgtcgaaattcagagtattgctgcatgaacagctttccttggctcatgttgctgcttttaaggaagtaatttccatagagagtgcatctgattctgctgtggagcttttggctgcacaagcggcctagccctttcatagaatcttttaaaattaaccttaatagtagaaaaacaaacttgctctctgtgtttttctctgttcaatttactcttggtgttcggcctggcaaatgctttaataaggcctatttgtttagaaatgattgacctccaagacctcgatgtaacgacctctggcatttccggctacataaagattacattctgaaaatatatctaatgctggcgtggatacaaaggtaacccatgggtacgtagaagcccctccatggaatcactcagctcaacaacctctaaagttctttcacggacaatcaacgttcggagtccaacttagctgagggatgacgtaccccaataggtgcgttgggggcctccgcacgttttttgagatcggccagaaggatggaggcatggctcaagaagaggatggaggcgttcgccaaagtgaacttcattattacggttctagggtatgagtagaaaggaatgtcctagttgcactgttaatgctaagatgagatctgagtgcttgttattcgaagctttgggccgaaggctgtcttataattattgacggagtcacaaaggtcgagtgaaaattcagtcacggacttatagaatatggccgtcggggcgtcgatcatcttacggagaaagctgattatatcgtactagggctagggccaaggttaattatgatgctatgattcctttttttggcggctgtgtatgagtgcagtgccctgtagatggtcttgcatataaagcttgaccactctcaacttcgtaccctgcccatttacatctttcgtttgtacacacaaggctatgattctattagatgcgtcagccgtgagagtgagaaaatctctgtcaattctagtggatatcagggtccaaccccgtttgagggtcatcttgacgcttgaattactgagtagcaccgttttctacaccgctatatacagtgtaatgtaaataactcatgggatcactcatgggtgaattcatttgcaaatacttcatgatgtttacattggctacattatacagctgtatatagggagtagtaatggattagctagggcccaccgccgaaccgggtgcgggcgggcccgcgaggccgcaaagcgcagatcttccaaaggtttcttaattccttgatcccatttgaatcctgggcttgtaagccatccaaaaatatggagacacctaggctgcgccaaaccccaacacaactcagcccactattgggttgtgctttagccgttagtgggtttcgggaagtcgtgtgattctttggagttctgctgcctggttgtcactcttcgaagtttccgatattgcgactactccgcactttcttccctcaaacataactcaaccataatcatccgcaacaacaacagacctaaaaatcattatttcaagagccctcacgctctgtcatcatgaacaccaccattcgagaagagaattgcaaatcagtcgatcttgacggctttggctccaccgccgacgacgcttggttcgattaccacactgcacctatggacggcgaggaagagactggggcgcatccccatcaagttgcggctttcaaagcgtacatgaaaggcgactccacaccatccgagacagctgccatcatgaccaagcctcatgatcccgacgagaggactgacatacaacgccgacatacaacgccgcgtactgggcataatcgaagacgcgctttttcagctgcccttaagccacacgcccgccctcatcgacttgataaaggaaattatcaaggacggtgatccatcctgactccaggacttcggcaactcgtggtcagatgaatggaagcagagccactggcgcggcgcattgacgaatcggaatccagccacgagagggaagaggcgcgaggcccacgtgcacctggcctttgtggaggcctcttgtataatggctgctccgggtccgcgtactgaagatggcatattgcacatcgtgaaacagtcgctgctgaacagctgacaagctagaatatatattgcgagatttctcatttcccaacccatgcctcccgagtagcctaccccgtatagtagaataacgaattctaagcatatagggagcagtggaaataaagacctcgggaaagttgctgatatcgcttatcgtagataacaccatcctatgctaatcttgcgtcacacctaagctgttgcacccgttgagaattatttgattgactctgcctttactttttatctacatggcgtctgcgtcatatggcccgaacgctgaacaagtcgcagcaagctgtcaaacgtgccgcaagcgaaaagttcgttacttttattagtctctttggtggattctaacagactcgaataggtaaaatgtgaccgcacgccggggagatgccaaagatgccatcgatttggtgcagaatgtgtttaccagtctgattcgatatcttctcatgcgtcgcacgtgacgcacccagccgacgccaggacgcaggctggactacagcggaaacgtgcttggcgctcctgcattcaatgcaaacgagctaaggcaaagtgctccgggggcactggctgtgttcgctgtactcggaaagccttggagtgctcttatgaaatggatggtattcctcgaaatctatccagtctcgaggcaaggtcgcatgcagtccccgcctggctcatgacagccgacttgccgtcaggtgaaggattgaaccagctcgttgaagtatattttgagcgtatccacactgtgcgatgtctaggattcctacacatcccaacgtttatggagaagttgaagagctctgacaaaatatataccgaggaatccgggcttcttcatgtcatgtgtgccttggccgcgccgtttctctacggcgatatctgcagtcacggtgatgacgttgtcgatcgcgaattgagattttacgaggcagggaaaggttgggcagatactgcactgcagtattcattccgaaacctaggaacccacaaactggaatgcttggcgacagaggttctgcttcacgaatactatttacgtactggagaatatgcgaaagcattggtggtttctgggcaaattgccaggcacttgcagctccttcagctgaacgtggaatatgaccccgaagctcatcggaaagcacgattgtctactcccgtcaaggaaagcaggaggaggcttatgtgggcttgctatctgctcgatgctttcattgagtgtggcatcgatcaacttcgcctaatctcggcggaggatatccatgtccagctgccatgccctgaggatttgtttattagaggtacgccttgcgttacggaaacgctccactcccgcgaagtacctcctggcatgcatacgcatttcgatattcccgacatgcgagcattatatatccgtgcaatcaggcttcgtgcaaagattcttaagtacgtgaaagagttagaagatgaagtaccctgggagtccgacaatcggtcgcggttctctcttctcaatacggagcttcagaatcttgaagcctccattccagatgcattgaaaatgactaccgcgaacaagtatctgtataaagcatcagggcgactcaatctctttttcggtcttcacattgtactctctcaaacatccaatgatttatatcggatctgtgtctcacagctggtattccccgatacctcgaccaaatggatccgagagcatgcaccaaaatcttttctcgaacggtgtcaccgcatgtgcttggagaaagcagtatatattgcgaccctcttgaaggatttatggctgtgtcacaagcccagtctcattgatacattgtatgcaaaccatgttcaaatttgcagcagtgttttagtgactactcttctctcatggggtgacaccgcgcctttgcttccccaatttgactataagagttatcgcacaatgctgcaagataatctcacaatcctgcagtacctgcaaaagtacctcaatgtagatgcatactgtcagtctgcaaaagaagccctgaaacggtttaaccagcttttcccggcagaagctccatcacaaatccatcgtccattaaaggatggcatgatcaatgaccaagtggtgacacactcgcagtcctcccttgagtacattctgaaccctttgggaacatatcctttagctcggaagcagacacaagatcagcctacattcaataacaccgagaagggagaagccatagtgggcgaagcgctcaatatgatgcctgaacaaccggtcacaattggtgatgacaatgttgatagtttggatgaatcggtctctcctagtccttttgaatgggggtcggagactctgatgtttgattccgcaggatatcccactttcttagaccagcttacgggatggggctctacgaacttggaatggaatgaatggggaaattaaagatggtgtcttcgtctttttttgtttaatcaagcagtatgttagagtgaatataccctggcgttggaaacgtcctttttttatatgttctgaatagattatatcttcatctgcttaaacgacgaaattccctagatgccgatttcaaattccgttgatatcgcttcacgctcgtgataatggcgaatgatgaggtgacaagagatagacctcctgattggagcggcgagatccgtatactgaccggatctcggtcaagccccataataaatccgacaatgccattgagcttggcataaaacgaagtataaaatgcgatggtatgtgagatatgaatgaagcactcgaccaatccttccttgatcaaagataaatcgacattggaattcctgggttactttctcattccatctcctacaaacatgaagactctttttcaacacacagtgggcttagcgcttgcttgttcaacttacgcttcatccttccatgtgttcgacaacacagcctacgtgaacacgtcaattggctacggaacaaccaatatcaactggattcccgcatacgtgtgcaacccgctcaccgaggggggagttttaccatcagccgatgtatggaaagacattgtccttgagtggaatatctatccaagttacccactggttctcgactgcgaagacctctatttcaccgatgcttccacggcagatcttcacttggagctcatgtctactctgcaaacctgggcggccgatgtgattccctcgggtcagattattggctggtacgggctatccggaaacacaatttcttcactgtatgatcactatcgaagcctgatcgcaaatcataccagccatgcgtttttcccgtctgcctacacattcagtgacagcctttccacctggaatgcgtcgttgacgtctgttctcaagaccatcaacgctatcgatgattctttgcccgtttggccatacacttggccgcagtaccatggcaactattctttcattccctcgacgctctgggaggatgaattgaatgccttggcaaagaatagtaatgtggatggtttcgttatctggggtgggaaaaaccatgccgtgtgcaatgatgcttgccagagcactgcgggccaacagccttggttgaatgccactcgcacctatttgaatactttgtatggcatttatagtggcgacgcggaagttgaagggtcccagatttttggtggaatatagcctcgctttactttcgttgagtcgtatggcattcactgccgctgtctattcacattttgactgttttggccttggactcttgtataatactaccacagctatgaagcatctctttctgtgacttgttctttttgcaacgaatcaattcaaggtagagggttatgtgagttgagtacttgaaaatatcgcaatcaccaaggcatatattccaaattctctagagaaaatcgataagctaataggaaaactgtatagcatactattgttgagatatgaagttttagcatgtgaaatactttacgcgaagatttggctcaatagatcattttcctatatatagtctaaaagtgaggcatctcatatgaactgcccgggtggtctagtggtatgattcgcgcttagggttaacccaaagcattaatgcgcgaggtccccggttcgatcccgggctcgggcccattcttttttcttcttcttctttttaaattgaaggaatctaatatggaaatgctaaaagcgtcatgcgaaatgtcattttgattagatggcaagaatatgtgagggccgcaaaagttctgcagatcggccgatagaacgtacttgcccatattaaccacacccttgttttttttcgctaatttaggttgaagaacaataagtatacatagatcccgcacaaatatcctaaaatccgaaatcaatacaaaagagaagaggtaaaaaaaaaaaaacagggctcgggcccacttatcttttttttgtttttttgctcttcttacattttttacatttgatcattttgaatatattcagcagcatactgtcaacctctttttcattcttacattcttcccgctgaatcaaaggtctcctggacttccggttgggcttcgtcgaattgaacggccggaatgatagcaaaaggagcatgcgctccaatttgtcagttgttttcggcgcgcctatatctaagggctaacctggaccatcgagcgagctttatggtacggtgactgtgttggtaactctcaattcgaggccacagcactcttaaggcggctattccgtcactgttgaatggtaaatggaggaacaagatgaggcagagacatgcgatttctttgtatggcttatcatctattgtctaaaaccgtctaacctcgacagcaggcttattcccaacagcaatctcaatcttctcaataacctcatcggtcaacttctccaccacctccaaagctcgaatattctcaaggacctgctgcggcctcgacgcacccgtaatcatagacgagatattcggattcttcaaaacccacgcaagcgccagttgcgccgttgtaaccccaagttcctccgcaatgggcttcaatgccgcaacctgatccagctgacgctgccaggtatcatcaccaacagttttccggagaccctgcacgtatttatcctccgattctgccagccgcgacccagccggaggagcagcaacatcgttatacttgcccgtcaagacaccgcccttcaacggcgaccacaccgtcagaccgagcccgtgcgcctcgtacagccagcggtactctttctccacacgctcgcgcacgaggagattatactgcggctgctcgacgacagggccgacaaggccgagtctgtcggcgatgcgccaggcgtccgcgatctcactcgcagtccactccgacgtgccccagtagaaggcctttccgttgtcaatgaggtagttgaagccgcggacgatctcttccatgggcgtgtcgcggtctgcgcggtgtgcgtacaccacatctacgtatggcaggtctagccgctgcagcgagtggttcatgccctcgatgatgtgcttgcgggagagcccgttgttgttgagtggtttgtctgggttggcgctgttggctcggccccagtagatctgaagatgggttagtgggacaggaaaactggatgggaaattgcgcttcctaccttggtggaaatgacgagatcgttttgcttccagccgaatttcttgatcgcttctccgagcacgatctcggactttccgccggagtatacttcggcggtatcgaagaaattgacgccggcgtcgtaggcgaccttcatgcattccagggcggtttctatttcctgttaattttggtctattctatcgatcggaatggtcgtaccattcccgacgtgtccgccatatgtgagccagcttcccagcgagataaccgagactttcagtccagtcctaccgagggaccggtattgcatttcaggaagagcatcagacatttttagtttggtgagatcaaggtaaattcagggggcaatttcctttatgtacgcttgtaggggccgacggcggggttacggcggggttaagggacgccctcatgtttccccgattcagacgccgagggccttccgtggcgtgcgaaaaacggggcggcgtctgttttaggctaatcagattggaaacctctggaagagtttgactaagaattgtggtgcaatatcggctgacgatgacctcaacgcaattgaatttgtttacaaatcatgtattatcccccactttcagtgatgactacctatcaggaaacccctcattcatctcaaaactcgcacccagttggagtagcaccaggcgagtcaggataaaccggagtctgcgccgtagaagcacatttacaaaagtctgtttccaaaggtatgtccgagcaaacgctcgccggctgagtggcacagtactcattgatcgagatggaggttgtcatacccggtggacaggagctgtgtggcatacagaaggtgtcatagttcgacgagcctggcagtagggtcatgctgtaccattggtttgcagcacaagagcaggagacgactacaagcaacgaggacacacaagttagcttgccgagtacagcaacgaatgtgcagaacagaagagaaaacctaccgctgatcacagttgattcacctcccgccaacgtgccctgatacaaggtcgacgtcgtatacggaatacccccgttcgagcactcggtggtaatccagggtgcgttgagtgggaaacaggtcgattgctctatgcaatgacctggatgccaaacagacgggaagaatccctgcgagcactcgattggaggctctgggctggagcaatacgaaactggaattcctaatgtgcagtctgtcgtgtacacggcggtttgtccattcgaacactggagctcggggcctggggtgatcactgctgaagctgcagccttggtgatcgaggacgtttgatgagggatagccattgtggctgagataaagagcgcgagaaagagatagaatcggtggaggggttccattatgacggtttcacggttcattgagcaggtatcggagaacttgatatgaaacttataatgaggcgatatgtgattaccgcgaccgagtagctggagcttgttttatatcggtatagatccaacaccgaggatgtccaatttgggctctttcggaaattcggagatcactaccacggtaaagtaacagtggctgaagattagctggggcatcagagacaatgagttcagctcatactacctcgagatgcatgcaaccttcgatcaatagcgatcactgggctgagagaaatgtttcaaatgtgattataaaaatagtacctttctaagacaaaaagacaaagggatccttatccatggaaatccatgccaccgttgaaatgtcagccgaagttgacttggtgatccactaaacccacgtgatatgacgtcgtcctcatgccataatcaggcaccaaggcatgatttcccgcgccagacccacttgggctccgagggctccactccacccgtggaccctgacccgcgatgtatgttgtaggcttgtagctacggtctcatttctttgaattgctagacaactcttgttgcttggctctattgtaaagtatcattaaaattgtcaagcaagaatgccactcaggttctatacggacagctgggcagtattcagatgaagtacttaggaatagaccccaaaaggcagtattatacgattagtactccgtagaggaatttggagtagaactcatatggtacaaactatggaatttagtctacttgactatagttcgacatagtaagccaaaatcctccctggatggctgagtgggtgagagacacgaggtcatctaattgctgggtgaaatattgatcacgggtgataccgcattgggaagctcagcaatggtgaaactagtcagggtttcgatcctcgtcaggagtagttggggtacggattttatttttctttcccatgtggtcgacagaccagcctaagacgaggatagcaccttccccacaaggctccttccaatgctgatatattgatgcaggtgtccataaggaatgacgcacatataatgctatccccgagatcttccgtcgaatggatacctacgccttctccttcaccacccagatctccactcgaacaacaaactcgtctcggatgatctagacatcgtcggattgattgtctggcaacacgcatctgtgctgccgctctttctcgccgctggaatacccaatttttcaaaactacgacgaccctgagttgcttatctttcgcccacctcctcgtccataactatacggcatagacgacgagggaaaggccgccgttcagcgtcgccatacccactttttctaattggccttcacgcagcgtttcaatgaacatcatttccacgccatagatcagccgacgggtatgcttacccgccgcatctttagccatgccggcgagccctgggaagggaataacgttcctcttcaggctgacattgtgctcattaccaaactctggaacgaatactcgaccggcccgtgtccgatatcattctcttcagctgaggctgattccatcatacacttgcaaagtatgcaagaagaagttgatctccagctcaaactggtccgcgacttcattggcgtcggcgtggacggttggacctctccggacgcatatgaagctgcctattcctgcgctcgtcagatgaaggttgacggtcttgcttctctcgacacggagtaggaacgcaagatgacagatcgtcactggccatttgacgaccacaacgaggacgagtagagtgaccgatctctacaatagtgcaagaatctctacatccagcagtgatggagttttgaattgaacaaaaccgccgtccccgattgatttagtatcatcgggttttccgacggccaaccatcagtgttagaatccaacattagatcggcaacgtaacttggactatcttggaagtaaagtcctccagttcatactaccagtcccatctgtgccacgggattgtggcacggactatgtacagcgtggccattacctactgaactacagtaggctgatctttccttcgtatggagataccgagacacctgatgagactgtatgatggaacattgggattggaaaagattaagcgagaaatgtagttcgaccgagacctacggtgtacattcctaagactggagacaaaacaaagtggcggacagggatggaatggaatgcgggccagcgaagaagcttgtatgttttacgtacgtagatccgactataatcgaccaatgaggttcaattgtgtaccagccaggactaatttaaaatatcatcacgagaacggcaatatgctcaatgtacaccctcctcgactgactggaggatgtccaacaatcggaatagaataaaacaaatgtacatgaattaaagctcccagggtacaatccagcaagttcgaggtccaacttgatgtagaagcgtgggatatgtcctctcggtcaagatcatggaagaacgaggcgctggtacgcagcgcatcgggttccagacacataggcggacatcacttaaaccgagttgtggccgtgaccgtggcggtggtggagatgtctgcgagcgtggccggcagcctgtaccggctccacggcttccgggacagtgtccttcttcgcgtaggaaacggccgtggaggtctccacgatggtggtcaacgaagtagagacagtccggacggctccagtgctggtcgagtacacgacaccgttgccatcacagatgacgtaaacatcacgttcgagatagatgatctcttcggtgataggatcgatgatggtagatgtgatggcggtcggggttggcgagggagtcgaagtagaagtgaaagaagtagtagcttcggcagcgctggtcacgtggaggttctcaagcaaggtgttgggatcgatcgaaataccaccaacggaaactgtggggagtgagctagtcgggattgaaatggtgggaactgaaaccacactggacgtggtcgtagttgcagcagatttcatcgtggcatactcagggccccactggatagccataccgccaggcaatccgtcctcgtgcagttcacaattttcgtttttgatcacggacgggacggggaactggcattgacgctgttcgtcttcggtctgaacgtcgaagatctcacagtcggtaacgatacctgactcgcttgtgcaggtatcaatggcctgctggagaatgccatcatcccaggcctgcatgaaatcaccgtggtatccgtatccagtgggatcaccgttggcgagcgcgaaatatccatcgacgtccttgaatgcgtaggtgttccagatagtctcgtagaagagtgagaccaggcgagtttcgaaaccctcagggcaggtaccatccatgacgagcgacgggtatgcgacatgagatttgtggtcagtggagtcgacatccttgccattccagcaagaggggaacatcaactcgaagcggactccgtcagtgcaatgctcatcgaggtaggtcttgttgggcaagaagtggcggtaaagggaggcttcagcggttgccgagtagtccaggcagttgaaaccaagggccttctggcgcaaagcagcctgtgaggcctgagcaccactccaatcggacttgggagggtcgggaactggccaggtgaaattgcgctggtatgggtcgcctgccagcatgcggaagttacttgggaaagcagtgacattctctccgtacagaaggtaatagctgatcggtgtcagtagaaccccactacgaaagccaaatcagacttacgcaagcatgcctccaacctcatccaccacctcggcgctgccattggtgtgcatgaagtacaaagcaggaacccagtaagcagacttgtcttgagtcactgcgcacgaggtgcaatcagactcgaggagcgaggcctcatccgagctcatgccaaagcctaaccataagttagcacatccgtagatgaagatcccatcttgacaatgcgcgcttacttccacctccatgaaccgcgtgggcatgagatgagaccgtacccggatccacaagggggtccagccgggcgagaccagttcttccacggcaaggaagacgccagaaagcattggtgaggcttgggaacagcgcaaagcaggccatcacaatggaggccatccgaatgtcctgcatcttgcgattgttgagccgcgtctacgggcttagtggataaaaagaatgaatgaatgatctcagggaaacaagtgtaaacgacagactcgccaggagtaccgaatcaaccggttaggcgtagagaaaggagtgcgagagatgggttgttgaggctaagcaataggttagaggggaagtcaagacattaagcacagctccatgcagatcgcagattttcaagccaatcctcgtcaaacaatcttatattgcccccttccagtacaagggaagaggaatgaccccttgcttgcgggctgaacacaccaccttccccgatcgaagggaaaaaaaaaggtagcagaggtatgcggacttaccgatcaaacgcgtttctcctgacgtcagtaaacaaagatgatttctgacgatttctgttggcgatgcctgaagatgcgcccatttatcagcctcaactctattttgttctcgatcgaccaaaagtactcacttgaatttttgtaaacaaataataaagaacgaaacagtaaatgagcgacaataaataaggagtgacaaaccctgagatagggcaaaaaaaggcgcgctggatgaagaggggcaggggaacagattaaggagcagaacacggggatcaagtacttcaggcaggaaacttgggaaaaaaacgcatatcccccttagcgcttggagaggggcctgagtttaatgacatggccaatcccttgagatggtagatattaggtaggctgggggcctcgtcacgatcagaagaatagcgtgccctgtacgccgtctatccctactgtattacgattggatatccgaaagtaaaatgagcaatcctggcttaatctgggaatgccagaacacgagggaaaagagaggacttcccgatatctgcgatgaaacgaacggcgcgttcctggtctaaatcactagctccgtcttggtgcgtcttggtgacccacgttggggacggggattggtttaaggggaagatgaaacgatccgtaaattatgcccctatttcttattcgataggggagatttgcaatcaggacggagtgagtataggcatataaaatataaaatctccggagtacaaattatagagagcacagagcacatgacatgccggcggatatacatcagcttcaaacggaggactccgtacctctcgatacatcgtccgactagctcagacagtagccgtttgggtttaacaatttattcctatccctgcaatatcccgatccaatccccccgtaccccgatgtctcagatctcacatgtgttggccgtgaaacagcgaagctttttggtatgattaaaggaggacagagtactccgtagttcaccggcagttcagtatctgatattttacgtggagataacaaattctattcggattactagaacgtgaggaccgaagttgacgccgaaaatgacctagttatgctagttgttccccctgttgactggaaaatggctctctgcagccaaatcaaggtgctctcccttatcgcctagcttgggcgtctataatatgcatcttcgcttccaatgtccttacgccctgccattacctccttggaagtcgacctcagtgttattgtttccgtgattcttacattctaagttccaaagctggcctccctacggaatactccgtgggctgagccgtaacccactcaacccgctatggattcgtgggcccattgaacccaccaaataggtagcaataggaaaaaacgtgacttgaacgcgactgcatgattcatacaattctggatagtatttttaggtagtttatatacatgagaagtcacttctccaatatctacatatctcagcgataaaaatccgtaactaaatgatttttctctctaggactgccaatcagctggcttacgtaccctagcacggcctaattccgagctaatgaacagaatgggtcgaaatgggtctatgggttgtgggttgaattttggcgcagactagcctccccattctcgctacgcttgggatcccctggaagttccctattgggaatgaaaaaacatccgagaaaacacaagcctaccaacggaaccagcatgatgaatacggctcggacacctttcattttggcatccaagatttgggaatcccatcccaccgtgtctggttgtccccgctcccagctaccactgtcaacctgctcgcgaatcgatgccggcagatcaacgggcaacgctgctttcatgaccgtgctttgaatcgcggtcgacaaggccatgcctaccacggacccgagcattcgcatcaagtttcgcgtggaggtggccacggcacggtcttcgggtttggacagggcttgtaatgcaacgagggctttctatcggttattatcgatcgcataatatgcagcaaatggcagacttaccaggctgaaggacaaagccgatgccggccccttcgataatcaggacaattacatacaccgctgtggacgtggttcgagaaaaaaggagtttgagaccagcgcccaacgtccacagcgccatcccgcagtacagcactggagcgtacctttggagcaatattcagtaaagtagtctcacgtgtgcgatcaagacacttaccgagccagcttcgtcattacgggtccagatatgacaccggccacgctctgcaaaagcaataatggaagaatgagggctgcactctggagtggactgtagcctcgcacatcctggaaatatatggggaggaaatacatgtcaacttgccacacggagttatacagagcactttggaggtagatgacagccgtaggtacctggccaaagagacgcagcggaatgattgggatcttcgcaaagcgcttctcaataatggcgaacaggataaagaagaagcccccgacgactagcatggagactactagtgcgctacgccacggccagatactccctccagaattgagtgggatctgtaaatccaaataagataaaaagatccccgatcaaagaatgtggtttacataccagtaagaaaaccacacacgcaatggccgcagccagtccaagccaatcaattttccccagcttttcccgccagctaccagacaccggtttcagcggaagacatatccacataacagccatacatcccgtagcaagaatcgggggaatccaaaagatccaccgccaaccctcacgactgttcgcacgcaacatagccgccgcgatgaaagggccggtgctagccccgagtccaatagcaccgctcaacatgccctggtacttaccacggtccttcaagctgaccaggtcgcttacggtgatttgcacgagggagctgatgccgcctccgccgataccactgagcgcgcggcacacatatagccaggtgacggtctgcgagaacccgcacaggatgtcgcccaggacgagaaagcccacgctcagcaagagtacgggcttgcggccgaagatatcggaaagccgaccgtacagcgcttggaacgcggtctggcccattaaataggacgtaccggtccaagtaatgctgttcccggcgtcgagtgatcgggagatggcgggtagagcagtcgccacggaattgatgtctagggtggagatgaagtagatggccgctagacataggtaggctgatagcaaacgtcggaatggtaaacgtgaggtttgatcctcaattgtgggagttctctgctcatggctctgtacaggagggtctaaggactgtagctcgtgtgacctgtcctcttgaatccccgggatcctttgcttttgagatatgtcttgctggggcggctgtaatatttgcactgggcggttgtccattgtgcccgactatgtggttctgcaaaggaaatgaggcgggtaagacttggtgatggcttatggcgagcgggctgagcacaccatgacacaagaacgtatttggactttatgtaccttttggagaatagggtcagtcagaatgtgaggctgctcggactattttggtgagagaaatcgcgacatacaagcgtaaattacgtctatcatggtttccttggcgtcatgtaaaatacaggatatattaggtctgatgcttgtttctcataaacaaaagacacattggaatacttaagcacattaaaggtgatgattcatctcaacaggatcctaagctcggaaagcgttggaatattgggttcataacgaatatcatacaaatcagagtagattgaagctctaaagtctatcccaagaaggcaatacatatacagtacacagttccatgttgtacagcgcagactacagcttgacctcctctaacgcctttctcgctcttgcaacagactttcgggcacggtgatcagaaaactcctcgacagtcttgccgccatcccgcacaataccgcgaagagcagcttcagtatccagcagcgacgtgcgtccttcctcgcggacctcgtcctcccagaaatcacgagctttatcccacctcttctgctggcgacgcatagagtaaatcaaacccacggcggcaagggtacatgactcgtacacccctgcggatggaatagcgacatacgttagagcggagagagcagaagtcagagtcgtcgtggacacgctgaaaagtaccagactctgagcgagggcttggagggatggcacggtggtggtgagcagcttggtgcgaagatcagggatttgggttggccagggaggcatgacagagtccgtcgccgagtcggggcttgaagttgaaggctcttctaataggccagcctgctggtacttgcccacggtccagatgacctccttctccgcctggcgaaggaatttcctttccaaaatctcggatgtaaccatgcccacgtcgtcaacgcgccagaagagtttccaccatgcaagaccgcgccagcgtggactggccagccctgcctcgagggaactgcggagctcagagtgagcacgctccgcccaggaagttacggctcggtccaagttcgaccgaacctcttcaggcgctacgccggcggtttgatcaaggagcgccttggcgtctctggcgattacactagcatcggctgcgtcaataagggactccactagagggaccagtgctggattcaacgcatccccagtggatgcttccgaggaagttacaagccaatcgatgagaggttgcacaccactgccattccacccacgctcgtagtcggtagcattgtccacagattcacggaatttatccagggctgtgctggcacggttgacatctaccagggacacttgctcgtttgtggatttttggtctgccactgcaagttcaatggctccgcgcaccgaagaggcctcgttcttcaggtctgaatgaccaaccatcgtgctgtacgacagcaggccatccactccacgtccacatacgatcgtgcggtgcactggataccgaacaacattatgccgaccggagtgcgaggtctggatggtaactgtggggacgaggaaggtgtcggcgtggaacgtagcggcgtgatcaggctcgacgcctagggtgctgactaggatctctaagttgccttccctcaggataggtgatggcacggatatcgtcggtagcaggtcattggggatggattgtgagatttcgccatatctaaataacgaatccctcaaatcagtactggtcacgggggatcaacacgcagatagaagacttgttcatacctgatcagcagtccccgggatgaatcggcatcgtaggagtcgagaatgtcttcccagttttctcgcggcgacaatgggtcggcaagtagtagtcgaacaagtttgcgtgcagaggtcgcatcgttcaatccaagaactaggttccaaatcgagaagaaatcagtgccatgctttcttcgaggggaagatctaatgccgaagagagcaatagcccgatcgtacgacccgaaactcaccagctactctgatcagaggcgtttcagactccaatccccgcagtgcaaattgcaaccgactgagattcacttgttctagggcggcatccttcacttcctcgagggcggcatgcagctccttgaaccgcggcggcacgctcttcgcagtgataacagtggatgtgctgaatatccggggagccgatgctgtgattgtattttgagctctggcgacccgtcgagatgtatggggtgtgtcgaggctgcgactggtgttggcgcgcaaggacaaggttcgtcgccagatcgcgcatgaggggcagtaaaagacagagctgatgtccaatggacgcgacaggctctttgccagcgcactgcgcaatcttggagccattgacgcgcggtgaagcgaggtttgtagggtatgtagttatcgcgatggcacttcggtagatgaacttggtcgagcggaagtggacgcgggaacaaggcttggcatccatcactattctaatggagatacagcaagataaatttgcattatatgtttacaaccattgagactatttccctactgatggctacgaaacatgggaaaaagcacacatgtttaactgaactgtcctatttatcgctagaattgtggattcacgggttaaatcgccaggcgagggtaaggatcaaacagatagatagggtatcgtatcgatcgtgtcgggacaaaaggcgtgggcgctggaggacaggaagaagaaatgcatagatcgtgtcataatatctcggctacatcctggtttaatcaggcatccttaggaggatccctctgtcgagaacgggggcgacctgagccagcggacctggtggtttcaattagtatgtggaattgggatagtggcctcaagtgaaaacttacatgctgatccgtcgagcaaccgtggcgagtccagcatcgttggcagcctcatgctcagcccgctccatggccacacgacgactctcctcgctctttgccataacttcttcttggctaggaggcacgtgctcgttctggatatcaaccttacgggcatcctcgaagttgtgaatagcctgtttgataccttcggcacccagcatgagtgttccagcaggaagacgaccgccagccgccgtcttcagctcagtgacactctcagactgctcgcggagaacctggaagacacgagagaggcggccaatggcaagaattttgtttttgatagcacgtcgtttgaactcgctggattcggggtccgttgacggaggcgaaattggttccttatccttgttttcaacgggagacacaggtgtaggaacctcgacgtcgacctcgtcctccaactcttccttcgagcaggtgttgagaatggcgatgagcatatccgtaattttctcaccaacgaagggcaaagaccaagtgaaaacatccatgaagttgggcagccaatatgggtggggggtgcagttgaattgacggatgttcatcacattgttctcatatttgaggacagccgccttgttgttgtagacatccaagtagttaggcgcactgaaaatagtcataacactggggaagccggtggttcgcgtctttctgtacatgcgatatccggcatcctgagcctcgtgtgctctgatgatggagagcaaattgttcttctccaaaaacgcgcatgccgcgggataagagaaaaagtaggaacaaccacggacactgttatgaatgaagaaatcgcctgtcttttcttgaccgaattcctcgagagggtcagcccaaaggatgtcgcacatgagcccgtgggttgggggttcgcggaagcgatcaatctatgtctgtaagttgtttgagcttgaaactgcggacgggacatatacatacagccttgatatcttcgagggtatgcagttcggggctgaggccgccgtggatgcagaggaactgtttgttcataaccgccgccagcggcagcgcacagaaggattccagacatgcctcgtagatccgttcactatatttgtgcttgcactccaacttgaaggtgaagtagtccgtcaagtggcgacattcatgattaccccgcagcaaccaaagtgaatcgggataccagatcttcaaggcccagagatagagcacgcactgcggggaaaaatggtcaggacggttctagattcgaaaaggagactcggatgatctacctcgatactgaaataaccacggtccacatagtcacccaaaaacaaatacctcgtctctgaagggtcaccgccgacctcgaacagcttcatcaaatcgtagtactggccgtgaacatcgccacacactgtaatgggcgcatccatttcgagcaaattaggctcagcctttagaacctgtgtaccggcgtggataatccatagcgcctgctcttcagaaagacggccctcacgatagaggtgctgcttgaggtactggagattgggcttggatgggtcttccggcgaccaaaacatatcatccggaggatagctgagagcgggtgcttggacctctaaggccacgaaagaccgttagcgatcaaattaccagatcttgcgaaagcgaccgagaccactgcggcattacctttgaccaccctctccattgtcgacacctgcgtgttgtcctccatcgtgtgcagtgtgaaatcgatctccgggaccggctgcttctcggtcacggcgcgcgctatagcccgatgcattttgacaaagattgaaatgtagtttgaattttaagttcggagtaaaggggggggggggggcggggggnnnnnnnnnnnnnnnnnnnnnnnnnnnnnnnnnnnnnnnnnnnnnnnnnnnnnnnnnnnnnnnnnnnnnnnnnnnnnnnnnnnnnnnnnnnnnnnnnnnnnnnnnnnnnnnnnnnnnnnnnnnnnnnnnnnnnnnnnnnnnnnnnnnnnnnnnnnnnnnnnnnnnnnnnnnnnnnnnnnnnnnnnnnnnnnnnnnnnnnnnnnnnnnnnnnnnnnnnnnnnnnnnnnnnnnnnnnnnnnnnnnnnnnnnnnnnnnnnnnnnnnnnnnnnnnnnnnnnnnnnnnnnnnnnnnnnnnnnnnnnnnnnnnnnnnnnnnnnnnnngagaaaagggcgggggtgtggcgggggcgagttcagcgcgggcgggatagagctcccacgacgaataagagtataggattaatagaacactgatcaagccgaagttcaaagggatcgaaaaagaaaacagtgcccaggggggtaataaaatgggtactgggggtgattgtgtgctgggggagatgtgaagggaaaaagagaaacaagttggataagcggcttctggctaagatcggtgggtctcacaccaacgttgatcgtgactgtatctgagacgtttcctttcgtttttcttctttagggggcaaagtatgattgatatctggatgatgtgagagacaagaattagatcaagttcagcctcatgacaacgtgatgactcgatgcctaaggcaactgtgatattttttaccccacgctatcagattcgatcgatcagatttcgattatgtcgacatttcactgcatagtgtgagcgttactagcaatattgtatggttcagttttggcctcggcttcgacctttcagcctaggcccgatttgcttagaccgctagacttgcgtatgcagcactgatggtctgcacgagaaatttttcatatctgcagctattgctcttcactcgacgtcggatcttatgaggcggacatttatatgatagggatgcaggcaacttacagctcagacctgccgtaggctagatctacaatactacaaatccctcaagaatgcccccctaattgatatgctacatgccccacagcgtggcagtttgatcaacaatcgttctataaatacatatgaattgagtgagggatatgactgacacaaagtataggcaaggcatattgtaagagcgaaatttgttaaaataccagattggaaaatgttgaagtgcctgaggtgttagggcataatctaactagttagggaattgtcttgccaaggaggcgctttcattcttccgccatgcaaagatatcttttcatgtaaacaaccatgccttgcgagtgtgcgcgagtgagactgattttgaggagagccttggaatgtacggttcttatcagcaggtgcgctgggttggtcaatattgatgaaacaagagatatcgtagggtttgtatcatttaggtagcaaaatgtcgtttttccaagtttatcttagattaacctccaagttcctatcgtactcaaactggctgcaatgttgtcccctgacaaagtatatatcactcactctcctctccactcatcccctccaatcacaccaaccacacagtgctagcgaggagatggcccctaagggtactgtaggggatgtatatgagtgtgtattataaaccagtagccatggatactctctattctctctattatatcccctttgcatcaggcgaataagacttttagctctaaggtttatccttgagactttccaaggttcaacttaagccatattagtcgtcgacaaagaagcaaattatacctaagatgacgtactacgtaactctaacgtcgtctattctactatttctctctggctttgcaatttttttcagcttagtcttcctctatatccatttcaatacaccttggtatcagcttcgctttgatgacggtatcagataatctagactgcaatcagcttggaagattcttgagtgcagtactcggagcgaccgttacacttattctagccaaaatcgtggagaaatgctactattactttcaatggcggtatcgctctgccaataccacaatattcaacgcaagaaccgccgccggtgaagatattcgtgcactggataacccagacgatactctttatcttccagattacaacacacctgttatattgccggggcatgctatctcaaatatggatcgagatatcaagaaggaggatctacacaaccttggagcgacaaggccatggaatggttctgtctaatattccaggactttaaaagggagcctcaaacaggattcgaggtagaaaacagaaatgaaaagagacaatgaggaattttgtatgtgctcggtcatcacattggctaccacctaactgcattcatgctctaggtgtcgttgaatttgcaggggaagggggtggggacacatttatttgctggaattacgatgctcccagatacttccctgtatgttacttacccagtttcgctacaatactcggatcctagtacactgtatgctcaatgtctttaagagcctgttagcttttgatctattggtatttttgattccggtgattttaattctattacaattacgaaatatattaaacagatcactctctagaacactctcatgatgtaccatgatatgaatttcacaggcctcttatgagtcatgaccataccttaagcttcccctactgcagtagagcctaattacaatgaaaagatagaagaaaaaagaaaaccggaacccggcggttggccttaccccctcgcgttaaaatcgagatcctaattgggtagccttggcgctctgaattattgtattacctaagcaaaagaatccgatgatcgctcggcccgggttccgaaaataagtccctactaggatgcgttaacatctgagacgtatagtctaccaggcaaacagctatctgctgactcctgcaggacgtttggccagaactccaaatcacagtgctcagctgtaaggtgtttatggatatttgcgggccaattttcagtatgtctgtcatagttcttgaagagtagaaaataaattatctcaaatagaaaagagtacaagctaaaaatcgctagagcgagctacagtacaacttatcattctagcaatgatagatatcagtcattccatcccctaatcttctataaagcctcacaagtctctcctattcactcacccagcgtagccttcatctgccgactccattcatccctcttgattcgcagaagaatcaacggaacgccacttagcaaacagaataaacaaattgcattaaacgaccaacccgtgccaatcgcattgaacagcggctgtgcaatgaccgcgcttacacatgacagactgtttcgcacgaggttattcaccgcgacgccgatgaaggaattcttcggtgtaaattctgtcagcatcgtcatggtgaaattggtgagaatcattccgccgagcccgtaaaagaagtttccgaggagctattatacagtagattagtccctgcttgaagctggaaggggaaggaagcgatagaatgaatgaacttaccgggaccaaccagaagtcgtgcttatcggccgtccatccccaccacaatagtgctccggggaagagaacacccgcaaggagacagttctcgcccagacgatcgaccgggtggaggatcaactcccccttatcattgtatcggccctcctttcgagcggtccgcgtcatgatataatcctaccagcggccgccaacgatagcaccgaaaagtaggcccaggccacccgggatatatgccacgccgacaaggatcgagctccaggagtatggtagaaaggcgaaggtgtcttcgatggaaacgcatatgaggtaatacgtagcgaagacaatgctagtgtaatagaccgtaataagaatgggagggtattgaaggagcttggtggcttccatgggctttaagaggaagtagagggctttcttgccggggctaatggcgtcgtttcggtgcttgtcgcggttctcctcgaggttggtggccatctccgggataaataataccatcactgcaaacactgcccagttatagatagccataaaccactgcgtgctgcgccaactccaacgcatggtgagcgccccgccgataatgggagcaagcatgggccccagcatgggaccaagcataaaagcgcccatagccttgccgtgctcttgcgtttcgaaaatgtcagaaatgttaccggcgctgactgcttgaatggaagcgctggaggcattcgcaaggagtcgcatggcaataaacatgccgatgttggggctgatagcggcgagaatgccgaagattccaagaaataagaagaatagtatgtatactagtcgacgaccatagagctcggctaggtatgaccaccacaagggggtgatggcgacagagagtgaaccaaaagcgatagacaagttcaccacagacacggtagtgtgcatatccttggcaatctctatcaggcaggctgtttgaaatcgaatatatcagtttcttgttctggctggggaaaatgatgacttatgaaaaagaacaccactactcagcggaaccaccaaccctcccatcgccacaataaaggtcaaagcccacttcatccccggggtataatgcgtgggactctgcaaggctgggacaaaacataaccactggaaagattccctgcaaacgtgttgcgagctattagtactgatttcttgtctgattccgagttctgccttggtaacatcttgcgtgggctcattgagcgaatctgttcgctcgtcctctggcgttgtttctgtgattgctggggattgcatcatgttcaatgctgctggagactcggcgctactgcatttatgtgcgagggacatgttggtcgctcgatactgaatgctcctgctgataagtcctcttggaggtatataaaattatcaaatccatggatccacctcggccgaggtgtggggcctcccgcttcgtacgaggctccacccgtggactgggcaaatatggagtaaccttatttaactgaggtacccctacctcggtaaaagaagtactaaaggcccaagaaaatctccgaagtggcatggagacaggaagagactgtctacgggatctgggctaaaacggccaaaaatctgcaatcccaacgagattacttggattttaagtgatttctcaaatccaaggccattgattgaatacttaccctcttatcgcagtatcggacgaggtcgtccagattcctctcaaattcgctggcaagagtctgagcagtgctcaataggctttgtagctccactaatgcttcagccgcatccacaggactgctgatgcgcaatttctttcgcgaagcatgtgtcacctgaataatacgcctgtaatattgaactgtggtgatccgcaggagatagatggtcatatcggtgaatttgggggcatccgagagcccggatgagggttccactccttcgatgagatcgacctcatccaggctgaggggtcgacgcgtatcgaagtccgactcatggattgaaggcgcaaaaccctgatcttcagccgcgcggaaatccaagtaacagatctgtgcccacaagcgacgatgcagctccacctgtacgacgtccatcgtccccagcagtagagctaaggggtcccggtgaagtccgtggaccgtcgctatccgaatggccagcccagtcaacggccatatcttccccatgtcatcttgaaccagtgtatcttcttgcgatcgcagctgtacgggcaaaggcgcctgactatgactggggacccaaaagagcaccgcctggtcagcgcatatcaccctctgttgccctcgaagttgcgttctcggaatcagatgcaaaattgaattccgacgtccggttttggctgaaccccgatgatggcaatgcgaagggatgcctaaccctcaccatcgagcgctctcgaccggaaattagaatcgaaaactgggagaagaaagagaacaggtgccatcgctcccaagtaacctgggttaccagaaaaggaacccggacgcacgtcacccaccatccgctcatcatcccctttgaaagtctatttctgcgccagtcaagtcggcccgaggagaaggatttagcgatcccagaacagcgactgcagataatcgcggagacgatttgggaagtccagggttggtagatttggttcgctctctttctttctttcttaagtaatactattggtccgggatcatacgaaagaggcttgatagaagaacaataatatgaaggctgagatcttatctgaacatgaattgtctttcaactatttcaaattctctactagcctgagtggcactcaggctttgacgatatcgaatccctcttcccagttatctagggctgcccgaatctccctgacataagcggggataccagcagagtagcacactggctcagaaaccttgccagggatgctaccacccatgtatgtcgactgtgttgtggggaagagagtcctgtcattgagctccacaacatgagtcttccacttatccgcagcctcaatcttgggattgatatacttgacaccgttgccctcgatcttggcaatggcgtcggaaatccaccggccctgcaccgcgaccgacgtggggccattgctcagaagcgtcggaccatgtgcgccatagatgtggaacatattggggtagccgctgacagtagtaccgaggtaggtcttcgcgcctggaatccattccttctcgagctcggcaccattgatgctcttcaggccgagctgggtcatgacaccggtaacaacatcctgtgactattagcgcgtgctgtctcatgagtgtatcaagaagaacttacaaatccagtcgcgacagcaacgacatcaagttcatggtgagttccgtcctcaagggtgatgcccgtctcggtaaactccttgatcgggttatttccgatgttaaccaggtgcaccgactcccgattgaactgctcgtagtagtctctttcaagacacggccgcttgataccgaagtaatgcggcatcttcagtggcgcaagcaaatccctcgcaacggggtcaccgatacgatcacgggtcttcttcacccagaaattgtacgactccttgttggcctcggcattgaacaagttatccttgtacacaccaacccaaaagcggaagccaccttccttccagacgctctcgaagaaggcctcgcgctcctcgggtgtgtcatcgaaggtgttgcgctcgtaccaatcatacaggaagcccgcaaagctggtctcgcggtaccggaacagctctggatagtttggcttgaggcgttcctgctcctcaacagtgaggtctcgcttgcgcatggggacggcgaggttaggggtgcgttgaaagactttgaggtcgccggcctcagggccccaagcctgcgtgatttgcactcccgaggcaccggtgccgatgacagcagcgcgcttgttcttcacctcgattttctcctcgggccagaaggaagaatggtgcacgatacccttgaatttatccatgccaggccacgggggaatgtaacgcttggcggcctaagtggttcattagtaggtcttgatttgactgatgggtgtaattgctcacaaagccggttccaaggacgagatacttggccttggtcgtgcgaccatcggcagtcttgatattccatttgccctcctttgtatcgaactgagctccaatcacgacggtgttgaaagagcagtccttcttgataccaactactttatccacgtgatcgaagtaatcacgcaggttttggtagttggggtagttgttgggccaattccacgtgttgtagacctcgggccaagagaactcgtactcggggacttcagagtcgacaccggcgccggggtagcaattccatcgccaggtgccacccatgtcgttgccggcctcgaaaatgaccgtcttcagaccgcgatcgcgaagggtcttgagcatgaaaacaccggctatctcgttagctaatgaatagatgaaccgtttactgtcaacttaccaaaaccagcaccgacgaccaaagcatcgacctcgagattgtccgcatatggcccagtcttgtcggtgtgaacagtcgagtagtccgtgagctcagtgttatacttcttcggcttggaggccgtctcctctttgctggccatgattggaatgacaaagtgttgtagttgtaactgaataagaagattgattgttggaatgtatgaagccttctaccccggacgcctcctcctacttatacatagcttcgttcacgccttactgctgatgttagcatatgttgtcaacattggaacaatatcatcacatagtcccatgacgcggagtacaggtaaccgcaatgcacccctccttcatgcgtccgcgtggcagacttttggggccaccgggacaatcctttttgtccaccaatttggtctcagaattaatacatcatgagttggaatctggcctctcaagagctccttgtcatggtggccacaaaaaactgctgtacaccacgtcacattagggctatcctcaacttgtcatcgtaaaatatactgcagctgtgattggtccccaccgaccgggaattgcggatccggaactgagacaaccctccagggttgagagcttccccgcattcggctccgcaatgcggttccgcaaagtatagtctccaaggttcgtattgccccggaattaagcgaactcctcggtaccacggggtaatgggaaagcgatcttccgcttgtttcgaactgttaaataagtcagtcccgcggtctccgccctgtgtttatcttaaatccgaactctcgtcaacaaacacatttcccccccacaatttccccacaatcgcctatccttccctacacaaacatcaacaacatgtctctaaatgcacaggtgcaatcgcatctccgcgatattgtagacaaagcttgtgaagaccaaaagtccggcattcctgggactacggtcgtggtcgttggcaaagatggcaacgaacttttcgctcactccgcgggtaagcgaggcgcgggatccgaagaccctatgaccctcgataccattttctggattgcatcttgtactaaggtggtggttggtcttgcttgcatgcaactggttgagcaaggaattctcaagctggatgatgcggagcagacagagggtctttgccctgaattgaagagtctcaaggttctgctgccagacggtagttttgaggaaaagaagaatgggatcaccctgcgcatgctcttatctcatactgctggattcggctatacctttttcaatgagagactgagacagtggtcgtacccgatcggcgcggatgagttctctgggcggattgaagatatgaagatgcctctgctattccagcccggtgaaggttggcaatatggtgtaagtatgatctttcggaatcacgaaacgcattgctaatgagtacaggttggtatcgactgggcgggaatcgcactggaacgcgcaactggcctgacgctcaacgaatacctacaaaagaacatcttcctgccccttggaattaagaacatgtccatgatcccaagccatgacatgcgtcagaagctggcatacatgaatcaacgaaacccagatgggactctgaggccccgagaccatcctcttcgggcgcctctagtggttgatctggagaacaaggctgaagtcgccagggtgttcaatagcggtggtgcgggtatatttgcaaagccacaggattactgcagtaagtcgcgggtagcttcgatcccaagaaaccacacactaacttatctccgcagaggtcctcgctgtgctgttgaatgatggaacgtgccctaaaacgggcagcaagttgcttcgcaaggagaccgtcgacgaaatgttctctaaccagatccctcagttccccaactacagccgtcaaagcatcccagatgcaaagccggacctgaccaaccccgttcctgaactgtacccagttgctgggaacccaccacagggttggggcctcactttcatgctgagcaacggcggtccaacagggcggtcgactagcacagggcactgggctgggctcccgaatttgtggtggtgggcggacagggagaagggagttgcggggattgtttgtacacagattctgccatttgtggaccttaatgtgcttgggctatggggaacagttgaggctgagatatacaaagccctcggtaaggcttgatgtgggagacattgttttttatttaccagccttcacatgtttcaggagggatacaggtaatttacccagaggtcatgtgaccgggatgttctgaagatgttcaccggtgtatatttgtaattagtcagcatgtcacgggtccagttgaaattctccattttgtcagccgctgattggtgcatattaatttaattcctatcagattcagctagcccgagttgtggagagtaatatattttccttctcctctcctatgtgtcatttacttgcaaaaattcctgtagtcaacccatgagttattctcatcactttcagataaaaacagacaataccattcagcattcatggatgtacggcggactaagggaaatccggggaatgcggggtcgaacgccccagaaaatagaaaaaaaccctaaatatgaagatccgttgcaatgcaggtttacgtggttcgttccccgctttttgacgacatctcagattctcacagcccctgggcaaaacgagaaagaaggaatagaaatcaaccacagcggtcgatatgtccgtccagaaacgaagcacgacacttgcacaaggatccagatccaggcgtcagtaccgctcttgcgaccaatgcagaaaatccaagcgagcatgcgatgcaccatgcctggatccgactagacgaacagtggttaacaattttgacggccagcgatcaccttgttcctactgtgtcagaacaaataaacgctgtactatggaatgggcccgatcacagactcagtctgcgctgagaacgcctcgccaatctcattctgggtatgggagtcgagatcttctcttcccatggaaatcaaatgagctccagattgaaaccggacctggaacatggagcaatttactcgatccaaattatacgcgggaggttatggattgggactcggagtcagcaaacgtggatttgtctgggtcgttggtcgattgtacttcaacgctgttcagttccatgctcaacgagcccgagacctcccaggaaaatgttcaggcggagattcctgacgcattgatgcctgcacggtctgtgtctgatctcattccaccatacttccctatttccccaaacacctccatgcaaccaccctcggatctcgaacttgatccaatgtatcaacagatgtggctggcctcccaggcttctcagacatatagtagcctcggatccgccccatcccaaagcccgcggcgaccgagtgactccgcttggatgtctgccaaccagcaatcctccgactggcccagcccgcaaagctcactctctccgttttccatcgaccaacaaatgattaacacatccaactcccatttaacttcagtcaacctgctgcaaatatatcacgatgtgctagagcataacctgtcgtgttggctaagcgatatgacttgtccctaccaacttggctcacgaaatacccctcagcttgtacccgaattgggatattcacggtctaatatgatataccagcgcacgatcaggctcgatcgcgtcgcacaatcttccaatcttctccagctgacacgcgccgaggaccaggccgcctccaaagctttgcaccttgcaatcatggcatttgctacgcagtgggcacagggcagttaccgacaccgcgagaaatatccgaccaggtgtctcgacggtggagaggacgaaatcgccaatggcgtcgccgacgagttcgatcgcattcttcagaaccacttttgggagcaggcgcagcgcgcgctccaacaagtcgccggtttggagtcgtatagagttacatgggccgagctgatcttcggcttcacacaaaggccgtggaatcccgacactcggccttctagacagcggatgcaagaacaaggctccgagtttgccaccgaatccgtcttgacaaagttacacgatataatacacaaagatggaccaccagtatacatggagagagcagctcggaaaatgcacgccttgaaatttcgctgcgacgtgctcgaaaagggcctcggcaagccgtacggcagtcgcaagaaagggacccatggcattgaagccatgagtgcggaagagcgagggacaattggcctgctctactggatggctatcatgtgtgacaccctctcgtcgtctataaacgaacgacccgtcgtggtgctggatcaggactgcgagcacgaacggcaaaaagagatccagcaagcagggaatatcgacaaatctatcggaagaagtcgatggaatctcgatatctttttgcaaggaaacctcaagcagatgcgccgaacgcactggccctgttcctatgaggctgcagctgaagacgtgatcaagtcagcgccagtcaaggttcttctattccgccacctgtcttacctacaaaacgcggttcgcaagagtgttcctgaagagcagatcgaggacattgtccgcatggcgatgttgttatatgaatactggaatagaacgcatggcgccttcttcgatgaactagtgcagaactaccatgcggttccgcagcgcatacggggctggttcctctgtatctctgcgcactggaaccttgctgctcttatgtttgccgacctgctagaatttatcgacgagaattccctaggcgtggatggtgcaactcgtatcaccggtcaagtggcgaggagaattaggatgcacagcgccagggaactatcaattctggcaagggtcggtacgccgtctaccagaaatagtgataacctttgtgtgccgcagatgtcagacttccaccacgctgtcaaggagagcacgcttttgaccgagccatggacgatagttttaatcagagcatttaccaaagcttctatggtctttctaggtgaagcagatgagtccttgcggtacgacggaattattctcgggcagagcagtcatgatttcgaggggaatatggagcaggccgaggattgtatgaaggggctgtggctactaggtaaaaagtcggatatggcacgggagattgccgagatcctttcactagcgttgagagaattgcggaagaggtgtgttatatagcttccacaattctgcaatcaacttcatattcactaatggacgcattttacagtaaggtggccgctcttttaccggttgggttgtcatagtagacgattgcggtgaatgatactaagggactaatgattgacgggcactacgtctataaataagcctctgttctgtatcgcgggagtattatcaaagtacgagatctcccttgatttggaaacaagcacctgcgattataaacctttaattggggtattctaggtgaggttcatatattacagttcgctaaattactatgatacatccatctcgatatcaaaatatgtgttaaatgccccaagaggtcaacgattgagttgctcctgtctttcacagtctgggccttcaagaagactttgggcagagtcgcccattgttgttccacgagtaaggcaccgggtcaagagtctgaacctcccagtcctcagcaccaacggcagtcagggcaaagaaaagacccgtaggatcatacttctgcttgagcgcatagagacgagggtagttaacaccgtaaaaggcatcctggagattcggctcgacaagatcggcctcgctcatgtaggcacctgagtctggggcaatttcacgtagaacgtccatccactcagtcacgaagcgcgatgagctctccaccacatcccaggaggaggtgaagttccattcggaaccgacaataacgtgtgagagggcatcgcgccatgcagggagcacggcattgtctgtggggggctcagcggcaatgccggtgccgctgatgtggaagccggcaatgaagagaccctataacatgtcagaaattatttcaaaaggggagagattatgcatttgtgtatgcatatatgacatacctgggtgatagcatccttgtaggcggcccaggtttgattgcggagatcatcgctctggaaaacgctgcgggggagcaggcgagaggcagtcttcacgacatcggttccaacgtattcctgagggaaggccacggcccaggcatcatggctggaagaaagttttagctgggatgtagatgcacagattttgcaaggaacggggagaactcagacgtacaagttatccgcgtggttgtaccacggagtgaaggagatattaaggcttttgagggtatcaaaccatggagccaggagtgcctccgtctgggcaacagtcatgttgggtgcgacgaaggattccatacggaaataatagtcaggatcaccggcatacgtcgtaccaatcaaagcatcggaagcaccgatatagaagtaaccgtaggtgccagcatcaacaaaagtctcaaaattgtcgaggtaggactgaatagcagcccagaaagcgtccggaccaggagtgtcgctgattgtgaaattgaaggtcacagtagtcgtctgcagctgaggtagggccttgactgtaagagaggtgacgactccaatggtactaccaccaccaccgcgaagcatccagaagacttccgagttctcagtggaggtggcagtgataaatcttccatctgccagaacaactaaacagagttaatagggagattctttgcacaaatttctcatagaaaaagagacttaccttgcatagccagaacctgatcggccgccagaccgtacatactggaaaggggagagtggccaccaccagcaacgtagccaccgcccaaaccgacagtgacagcttctccgccaacaaccgagtggccgagggtcttagcaaactcataagcctcatggacttggataccggagccaaacttaatggccggaccaacatagccattggcagccttaaagttcgggagatactccttgtccttgaggtggtgggtccaaatggagagagcacccttgccggaggacttgccattgaaatcatgtccagtattcttgaccactagtcgcaagttcaagttacgggcaaagttgaccgctagctggatctgagccacggtggatacgttcactgcatacgtcggatatgcgccctgcgtgcagctggcagtatagttgaacggtgatggcaggcacgagcggccttggtatagcggcgacatcaccgaggtaggatcttccatatgcaggtccgagctgagccagtcagctgtgacgcttgcgcacttggcggcatcgtactgcggccagtctggatagcagtaggatgccaggggcaccgctttgatcaggctgccgccaagcaagatatcgaagatgtcccaaattggagccaccggccaccaggagtccccgggcattagcttgcagctacgatgagcactcctcttgagtaccgtggagttgctcgcaaatgcgaacatgttagcgaccgtgctattctgcaatgccgccgacacatcagagaggacaccttcggtcaactgcacttcctcattttggaataacgaaggtgccgaattggccgtggccaccaccgtagttgctgcttctgtgagtgatgcggtcgatatcgcctgagcgagcgaagtgctcgcgaggagagtaactccccacatgcccttcatatcggaaatttagcaagacaattccaagaatcaaaaagaaagagagacagaaaagggctaacgagtcaaggcaaacgatatgaccaactccctgctaaaaatgtggacaaaagtgctgcttaaatatatcttctataggggcacgagggacccgagaacgacagagccataagagctttcgcgactatcgggcttgtggcgctatattttgattaaaatatctcggtcaatttattcttttggtgctatagccgatgcgatgaaagccattgtacactaagtgactagttgcataagttagccagctaggcgcaattatttcgcttaccaccgtctagcttcccacaaaacacaaaatcaagaaagtgctctctatttctggggtttctccgatttgattcaaagatactgacatatttggtataaaagcaatgtgttcgttcgtcaaatcagttttctgatacctttagtttaagtgaggccgattttggcccccaatatagttccccagcctaggccctaagtctttacatgaaacttgactaacttgattgcattgaattataatagctcgtaagccatacgctagtctattgcaaggctccacgaccgcaactaggcatataatatagagaagacggcctaattggatcacaattactccgcacccgaggccttactgtgtgctcagtaagcttcacagggataaaagggcgtgcgaaagttactttctcgggcgatgcagtttaatatatgcgagtgagagtttgatgccggttgcagggatgttgcttatacttaatgtaaactggcgcactgcccagctgagtcggattcttcttgtcaaaacaaaaggtgacgggcgctgcttttttgtctacgagatgattactaggcgagattatgggttctaatgataacttgcaatcgcaggccatcggcctgatctttgcctttccgtgcttcgctagtgcagctgtggctctacggctttacagccgcacgttgacgaaatcgtttgccgcaggtcagttcaatgatccaattcctcttcgtttgtgggttccatgaaattaatagagaatagatgactgggttatttgtctcgcgatagtgagtaccgcaaccactctaagaaagtgcccggaggattgacagaggcagatcatgtattgggcagagacatttacgtcttataaaggtaggatatgaacagcaaggatactccagcgcatatataactcatgaagctaatcatctcttagtgatcatttatacatacattggatataacgtctgggatataccgaatgactatcccgccattctcggcagcaaatatacctacgcggtgggtggaatatatcctttctcagcatatttgttcccgcttgctaacgaaatagaccgaactcctctacaatcccattttagccctcgtcaagacctccatcctactcttcctgcttcgtctaaccggccagaaacactcagtacgcctggccatctggggtctcttaattttcaacggtatcgccgccatcactacattctttatcactgttctgcattgcatcccagttgccgctaattgggatgcggcttcatatcccaatgcgaaatgtcttgactttgcaaacttcgtcaccggcacgggctcagtttccattctcacggatatccttgccttaatactacccacctggatcgtatatcgtctgcagatgcaacggagacagaagttgatgctgattggcattctgtccttgggtcttctgtgagtagctcaaccgaacgtcttctttcctcatcaatctgatactaataaataaagaactgtggcggctggcattatacgactcattctccttgatcatttcgaccgtcatatgccggagaattacacgcactcggtcctcttttgtgtgtccactatcgaagttggattatcgtttatcgctgcatgtgctccctcgtttaagccgctcgttacccggctggtcccgaagctcttcggctccagccgcaccggccgggataacnnnnnnnnnnnnnnnnnnnnnnnnnnnnnnnnnnnnnnnnnnnnnnnnnnnnnnnnnnnnnnnnnnnnnnnnnnnnnnnnnnnnnnnnnnnnnnnnnnnnnnnnnnnnnnnnnnnnnnnnnnnnnnnnnnnnnnnnnnnnnnnnnnnnnnctcttcgcccccagccgcaccggccggtataacagctccagtaaccggttgggctacaacctcgaggacacgtcaaacttcacacgccgtacgcacgaccagaccgtcatcgttgaagctggagatggcgagatcggccacagtcacacgaaattgaaagccgataatgcgatcaccatgaccacggaaatggaggttacgtggggtcggtctaattgcgaggagcaggataccagcagtacggagagtcttgtctacggaaaggggagtagcaggcgttcgaaatgagtttggaagaatattgctttatttgttccatagatgtactctggctcgattaaaatatacgactgtaagaatgaagcttcttgagctgtgtaggttgtaatagttgcaaccgaccatcaatacaactggcagaaagggggacataccgctttcatagcgaccgccttcgagcggggtctatctttcgaggccatcccagaaatagtaaacatccatcagtggttttacgcattggataagtttcccatcagaactgagaagcgtctcgtctgagttcgtatcatcgaatcaagagcacaatccagtccctcttctcctcagctcggagttgtttctggtcgggtgtgcaccctggtcgtctgcggaaggagtgctgatccactgtgggtgtgggtcagactccggtctgagaccactctttagatagaggtaggctgtgtgaatataagacccattacctacatatatgtatcatgtatgtagccacaacattgatggaaagaccaagggttgccagcatagtattccaaaagtgctgggcaataatgctgcgctacctaagccataaaagctggagagacctagacaaaaatgcatcatttgatgtcattagtagtaaataacttacctaccaaaatagttaatcttgtgcctgctgctatcataggaacaaatgctgcctgtgtcttgcatgagatggtatctgtgacaaaatagaccagcagcattagctcaggctccaacctgcacctagccagaagtggctttcacagctgccaactcccgccacaaactagtttgcttgtagcaaaaagtacaatgccgcgaggttcaaaccaaccattctcatcatttttacccatgctgaatcaacatggccactctcgaatctctcaagtgtgctcttaggcaaaaggccaccgcaacggggtcatccccgaatcagccattatcagacatccagtacaacgctggcctcgatatcttactgcagggtccaacataccaagacttcatcatccctcagatctctcggctgctcgctcctctcttggactcgaatatccagatatcggtgctagaaataggacccggctcaaagagcgtatttggatatctgtctggtcgtctgaggcggaaaatcaggacatacactgcattcgagcccaatggcctgcttgctacagggttggaaaaatggctttgctcgaaatcagaggcagagtccccgctgccctgtctggaaagctcgcctgatgtccagcgaattctattcggtgtagagagcgacacgaatagtactgatacgcgtgacaaggacgaaaagtttgatgttatcctatcttgtcacggcatgcatgacatgatgccaaaaaccaggttcatcggacaagcgctagaaatgctggttaagcaacccgaaggaggaatggtggtgatttttcatcgcgacttgaccctacacctcgacggattagcgtgccatcgtaccgcttgttttcctatgggagctgttcgcgtggctaatagtgatgagatactggattcttttgctcctttcatcgcagggtttgccatgcgggatgtggaggcggacaaggatacccgaattgaatggcgtgaggtgtgccgcgccttgggccgctcggaggctcacccagaccatctattattcagctcgcccaatatcatgtcggccttcacccaccatgcgaccgcattgccggagctgacagcacaggtgccattgttggaaggaggcaaagctgttaagaaccgagaggctcgtcttcaccaccccgcctcgactgttaggccgacagaggtacgacaaattcagcagtgtgttaaatgggctctgaagcacggtgctaatttgaccgtcgttggcgggggtcacagcggccactgcctatgtcccaacgtcgtttcggtcgacatgagcgcctttgaacaagtgcatattatcacagccgaggatagtggactagaatctggtcttgattctgttcccttggttgtcgccgaggcgggctgcaaggtaggggatattgtccgcaagaccatggcagccggcatgacagtgcccttaggggcccgcccaagtgtaggcgcggggctatggctacaaggcggcatcgggcacctggctaggatatatgggctcgcgtgtgacgccatcgtcggtgccgtgatggtcagcgtcgactctagccaagccttttgcatcggccgtgtaccaagccaacactggccggccggtgccgtgcgcccagaaaacgaagccgatctgttatgggcgataaaaggcgctggaaccaacttcggtatcgtagtcagcgttactttccaggcttacgcggctccgatgttctcgattcgaaattgggttgtcccgctgagtgacaatctcgaagcgcagggcaggctcagcaattttgataaattagtcgcgaggcttcctcggaactattctatggacgcatatctgtattgggacctcggaaagttgcatcttggcgtgaccatgtttgaatcttccacgaacgggcgcacctctggaacatccatctccacgcccacgccagcagcaacacttttcgagcgggaagacaaatttcaagtcgtggactgcgtcggcttgtttgacgccgatatgtacatgtccggaatgcacagtgggcagaccagcaccaatacatcagcattcaagcgatgtttattcttaaaaagtattggcgtaatgaatgtcgccaaaatattgctggcagccgttgagactcgccccacgccactgtgctatctccatctgctacaaggtggcggagctatcagtgacgtggcggccgatgcgactgctttcggttgtcgagactgggactttgcctgcgtgatcactggcgtctggccacgcgaccaagatggaaccgaagtcgcacaagccgccgtacggtgggtatataaggtcgctagcgacttgttgcccacgagtagcggagtttacggcgcagacctggggccggaccctagagacgccgcgctggcggccaaggcttttggatcgaaccggccacgcctggctcgcctcaagcgcagctcggatccgcataatgtgctagcttacacctgcccgcttcctaaagcgcccatagaacataagcttgtcattctagtcacaggtgtaagcggcgccggtaaggattattgcgccgacatctgggtctcggtattccttgaacacacccagaaaatgattatggcgcgcgcagtcagcattagcgatgcgaccaagcgagaatacgcggcggccactggtgccgacttcaaccgcctgcttcaagaccgtggctataaagaggaacatcggccagcgttgacagcgttcttccagaaccaagtgcgacatcgacctcggttgccagaggagcattttctaaatgtggtaaacggtgccggagacgtacatgtgctgctaatcaccggaatgagagatgaggcgccagttgcagccttctcgcctttggtgccaggcagcagactgctcgaggtccgggtgaacagtagcaaagcggcacggcttgcccgccgaggctgccatggcggtgattctgatcatggtgacaaagagaatggcagccgccctggcctcgtcttcaataatgacgcgaccggaaacgacgcggccagaaggtttgccgaagaatacctgattcgcttcatcgatggagacctccagcgactagccaacatggtgcgtccagtacctgactttccacgcccgggcgttgaattccgccatgtgctcaacatctgccagcagccgggtgggctagccctgtgcacctctctgctacagactcacttcactggtgaatgggccaaggttgacgtgatagtgagttgtgagaccggcggcttcatctatgcgtcggcgttggcctcgcgggttgatgtgcctttggtgctgattcgggaagcagggaaactgccgccacccaccgtttccgtcctcaagtctacttcgcatatctcttcgacatccagttcaaatgagaataggattgagatagaacaggatttgatccctagaggtgcttcggtagtggttgtggatgatgtgctctccacggggaatacactctgtgcggtgctacagctcctaggtgaagttggcatcgctgatgtcagcgttatggtcgtggctgagttccctgttcatcgcggtcgggaagggttgcgccagcgtggatttggcgtcaatgtccaaagccttttggtgtttgacggcgcctaggaaaggcgagaatgttggaatgtggaatgcagattgttcttctgctaattgaattttgctaaatttgctagtttgatctacaacatcctaatcgtcttattctctcgatgccttgacaagtcaattgacataatttctatctaatcactggtagatcatcgttggaatagtgcgtaatatgtgaatgttgtggttgtgctccaactgtttaccacgggggtcgtgagctaccatctccgtgactccgctactccgcagttgatcagcatcttcaacaactcaaccatgtacgactcctatcgtcagtatttccatcatgctcacttgtatatatgcaaatagctaacactgttctaggtccccaccctctccttgcccaggtcccactgaccgtttcacccttcatcaacctccccacctccgtcacattaccctacacgtacaaatctgttccctcgtctctacccccgtcagtgacaatcgatccaaacagcccggatggtaaggcccggtatgtcgtctccccaagcggtgagcacgcagctcatccagacgatgtcctcgccgcatgccactccctcgaacaacatttgaatcaggctcgcgccaacgcggagcaagcgatcaacacatggaaagaggctataaaacaacgcgagctagcggaaaagagacgcctcgctcctgggtggctcgaccgcgaggaaaagctccttcagcctagccggaccaatacctcccctgacgcaaatggcgatgcccctacaagccttttggatagttcttcccctgaccagggctcttcgcagttaccgactatggttccgcacaacgatggggaggagctagatagggcgttcggtggtctaggtgtgaaatgaggaaggatggtcttgcaagagagttaatccctcattgctctttacatcacaggagtgcttgggaaccgaattctcaatgtggcacagtggatcactctctaaaataatgtctctatacactatgtttcgggcggacttccagcgctgggctcttcgaaggccttgtcaaacagtttataatctcccaagtccgcgacatgcgcttcgccgtggtgctagcgggactttgactgtcagtgctaagattatgttgtgctagaagagtcgagtggatagggtgaatgatttcacaattgttcctttgactagctacctatggactatcatctggaggcagttattgctatgaaaatatggtatatcatgtattcaggatctggcaataatgctgcatataagattcctatatgcgaatgatcaaatacaactgtgtgtttaacaaaagtgcttctgacgctggttatatatatctaccaggtgagttcctatttcttgctttttctttcttatgccgatcatcttgaataagtactcttcttaagatcttgctcgtcacaatagcatctatattaagatgaacttggtatctgtatctcgtctacgccttcacgccctcggtttacttcctgcgataagggtgacttatctttatcaggagttaccatagtaactgtatacaccgtatatttgttaaattatatagacaaattggcagaaaggctagtgagtgtgctgatccacgcggtgtctggcaacaatcccaactgcggctcataagctcgcggaaaagctccaccccgcgcgccggaagctctttttcattccatcatctcgtcatatcattcaatcaattttctccctctttacaattaaacacagactccaacatggaggtcattcgcagctcccccgaagcctcctccttcgtgccactggctgaacaccagtcgcgcaccccgagctccttctactccggacccccagtattgtactaccacagccagcgctgcaagatcgtcattctcgagcgcgagctactcgccgccccagcactgaatgccctgcgcggccaggaagctaccaacaacgccgccctaagccatgaccagcaggacggcgacgagaaggagatcgcaatctcaggcgtggatacctgggtaacatccgagtgagtttagtctattaattttccctcccatccgaaaaccaggacaccaactgactaattccatcacccaacagcaagttcctgctcttctcccccgcagcatcaacgggcgtgtcgatcccctacccctcgatctccctgcatgcactccaacgcctacgcgtcccagactccgatgccgaagtccagggcctgtacatgcaggtcgcgacgccggatgcgggtgcgccctctgccgacgacgaagaggaatgtctcacaatgacagtggtgctgcccgccgacgccgcgctagcagagcccgtggagcgggagacggacacacccacgcagcagctttacgacgctgtctcggcgtgctccaacctacacccggatcctcttgaccagggcgacgaggatgatggggatgggcctcggttcgtttcggcggaggagcacgatggtgtcttccagcttggaaatggtggtttgcctccgcctgttgatggcagctctgggtggatcactgcggacaatatggatcagttctttgatgcagatgggaattggattgctgctggtgagccgccttctttcccgcttgggcctggcgctgggactgttcgggctcgggagggcgagaatggagtcgaagagaatggtgttgaggatgagacgaagtggcgcaagacggattgattgtgatcagactgttttaaggaagatatgagataccgcaggattggcgttcaaattacttgagtagttacatagtaggctaccaattcattttactaagggtcattattccaaggatacattcgtacatagggaagggttggattggatttctactaataatttcgtctttctttcatgaatattaacctcataaaacacacaccaaacataaagacagaagaaaagggcagaacatgaggcgacaagcaaaataagaagtaatagaacaaataaaaacaggtagaagaaaatgaccccgaagcttttgcgccagtatcaggtactgcacagtaaaaagaaatcaaaacaaatcaaaagaaaactgtcgctttcaaagtccacaaaagacagcaggattaatctattcccgtaggaatccatcgccatcgtaaaggctagcaggtgtggcagttccaattcccagtccgagccctttaccagtaggagtagtcatgcctcggcggggagaagtaggagtggggggtgtatggtggctcgacatgtgaggcggtagttgttggttggttggcatggaacggggtgcaccgttcttgccacgggtaggggaggagttaggcgtgcggaacgacccaattgggggctgcatgggggttcgaggataggaggtgggctggttagaatcctcaaagatagtgacgtggtcttggaccattgaggaccggcgggggccgtagaatggagaagcaccaataggacccagcccgtcatccaggcgagatattgaagcacgatcttggcggaatgcgcgatccggagaaccgttgctcatgcgttggtgtgagtctgtggatctccgccagtcactaccttctgttcctgtgatactcatgacgaaagggaggcggctgggagaggccaaggggctgtctagcgtatgatgggaggatgctaaggaaatgcaagttgactgccttcgagctggactgacgccgggttggttccgaggcccctttactgctgaccgtcgtgggctgccaatgccaagagagttttcgtggtatggctcggggagctcccatacagggggcactctttcgggagagggagtgttggtgagagaggtgccgtgagacgaagggagagatgtgaacagttcagggagagcgcgagtgtttgcgaatggagacttattggccatggaagatgaaacacggtttctcttcttgcaaggactgtcatcgtacattggacgctgcggctcctcgaccagtggcccgagggagcctagactgggcttgccatgtcgactgccgtacttgctgcgccttgaagaggacagaggggatgctgcacttggtggcaacgaatgcatgggttttgttggggtgttgattgagatctcacggagatccagctcctccatcttgtcgaagtcttctggttcctcttcgacagtgggagaaaacgtcgatgacccaaatgtcatgggtggatggatagagatacggacacagttttgacgtcggtgacctttgcgttgtggatttccacccttgagtgcagagggaagattgccctttagagagagactggtacgctgcatcggacttggtggcttggtgttgcctggtgatctcacctgatggaacaaagtcccgcccccgggtgagccaacgtagaaggggtcattatccatttcgaaattatcgtagccgatgctgtttcggaactgattgccgtatgggacagaggatatgtgggagcccgatgatcgccaggacgagactgaattttgatgtcccaaacgcccaaccgtcccagaccgcaaggaagcatgtcttgaagggggatgaaatgaagacatagagtcagtccgacgtggagcaccaccaaaacggtcgatggaggcgcccgagtggtgagtcgtcaaacttcgtcgaggtgacgggcacacagatttatggcgaggttcagttgtcgaagaggagcggatagggaagttgtgcataggcgggatggaggtgtttgtggcaataaagctcctccggccatccttaaccccaacgtcggcagcactgaaaggtacaaacgtgccagagggcaatacgggtgaggtctgatcggtgtcagccgacctagaaccagttctgccgtcatccaaaattgagctattggtggtatccagactcatagaggaaagtctcatcacagagtcattcctagcatagctgaatctgtctggagggtatgcagttggtggaggaggaggtaccgggtgaccaggcatcatcccggcagtttgactagcaatacttcccccgcgaacacgactaggagaatcttcaatgttgtttgaattcaacatgccagacgagttacggtcttttgaaacaggaaatagacctgactgctctcgtactggagggggtttcacacctagatggaacccagcttcatcctcgttgagatctggcgtttgtgttggggttctttctgctggcaattccagaatcccttcgaccgccgaaagtgggacgtcttctttcgatattgatattgatgctttaggtggtgggctcggaagatcgttcgattcactcaatgtggccaacgagctcatgcgtttgtgagacaatcgtgataggcgcttggaacgagatcgagaaagggaattgcggaaagatcgtgctttctcggtgaccggtaaagaagattccgagtcatttttcagacgaagcaaactttctctcgacgttaattgtccccattccgacggtttaccatatggaagctgcccatgtgcccttaagacgcttccctctgcccggctcagttcagtcaaggtatccacctggcaagattgcaagcgactgcgtggtctctgcgtaaagcccaccagtcgtattgcatggcgctccttgcgatacctgacccagacaacaacgctgaccactgaaacggcaatgaagacggccgcactacaagcggctatcgcaatgacggcgggcagcgccagcatgctcgcctgctaaagtgtaactgggctgattccgatgctgtatggacacaataagggggtgtggtctttagaattcctcatccgtgaatagaggattggtcgtcaacatgcgatgtcgcgaagtatcgctatatcaaaacggccacaacgaggcttcacagactcctcatggaacacaacaaagtctcacaggaataagaaacaacgaagtttactggcattccatcaagggagcgccaattgttatgggaacattgattctagccgaggaatgctaattcatcaccaccgggtgcaaagaatgttggcggccacactacccccttcgaccatgtttcaacatggacagcgccacgaatataatcatgccagtagggcatctgaagaccagtatttggtggtgggaatgtatttctaatgcctccaaccctggtttatacttgacaagaacttatcgctcttccaagtaccctcttcctaccttttctttgacatctctgttcgatggaatctagggtgccttttcagacatatttgtcataactacagagtagataaatggctcacgcacccatgaaagtgttcaaccatgacgcgttccactggtcgcctttgacgatatttacgaccaaccaacaatatcagtgcgcccttggtcaacgctattattgttcggataagtgatctattttgattccgaccgagtggcttcggcagtcccggattatatatattaatggtataccggttggattgtagagtgatcatgcattggataatcaccccgtggacaaatggccaggttcagttggttcctactgatagcagagcttcgaatcttcacagtttccaatcattgccagaaaagctagttcaagcatctgtactccgtactcctgtccgcgatcgggagtcggaatggaggacctcggcatcttggccattccccagaagaagggtcaagtcagtaatatttaagagattgatcttctatagctggaacgatatgtttcgatgcgattccaattgtatatctctaggggaagtgcagagtggagatcccacgtcgcatttccccgccggatatgcccaggtgggaatagcctctccaatctttaatagacctgaccgtgttgaacaggtctacctaacagcagagagttatgatagatcccattatatcctgtcaaatgacgactctgaatagtgtcattatccactatgtacaggaactagcgccattgaggcacaatgcgaggatccccaccaaggtctatacatagtagtgaatagccccgccagcacgtcgctcaccgtgtatcagttagggattccttgatttgcccctcacaggctctctatttaagtgctcccccgagcttgctattttccccttcccttttctcatcttctctctatctactcttcgtttgctacaatggctgctaaccctgtgactaaaaatggactctttgtccacaacaataccactgctcctgagcattccaacctcatgggcatgttctctctcaagggaaagactgccattgttaccggtgctggcgctggtatcggtctagccgttgctcagggtctggccgaggccggtgcaaatgtggccctgtggtataatagcaaccctaagtgcattgaaagggctgccgagatcgccgagcagtacggtgttcagagcgcgtagaatttccgcaatgtgattggttttatatcattctaacaagatttattttgcagccaaggcttatcaggttcaggttaccgacgcaaaggctgtcgagaacgccgtgaacgacgttgtcaaagaattcaatggccgtctcgacgtttttattgctaacgccggtattccatggactcagggccccatggtcgacggtcccctcacccactaccgcgatgtaatctccactgatctcgacggtactttttactgtgccagggccgccgctgagcactggcgccgccagaaggaagaaggaaccgatgccaacggtaacaaactcaccaacttcacatacggcagcttcgttgctactgcctctatgagcggtcatatcgtcaacttcccccagatgcaggctgcctataatgccgctaaggttgcggtcattcatctttgtaagttgttattcagactagatgggctccgtcgctctactaacgcctttccaggcaagtctcttgctgtcgaatgggtccgctttgctcgcgccaactccgtatcccccggttacattgcgactgagatctccaactttgtggctgaagacaccaagaatatctggcgcgataagatcccgatgggccgtgaaggccaagcccaggaactgaagggtgcctacctctaccttgcctccgatgcttccagctacaccaccggtgccgatatcatcgttgacgggggctactgcgcaccttaaacccgaattaaaagcagggtctttcgtatgaagcatgaattttggacagcgatttgatttgaatgtgatgatagacgaacgtaacgatgaacagtttagatggacgagtctgaatcaaaatattttatttgcaacatccccctcatcatgtctagaatgactcgcccggtaaaatggtgccagcgatgccagatcccgacggatgcattttcccatcaccggcacgaccagtccatttctgcttgtgcgcgattgccgagccaatgacgctatgagactatgccgtccttgtgggaataatggctcaatccctgcatggcgttgattaaccccaccaatgtcatctggaatgcgctctacccccgcgtgacagcgctcatacaacatagaccgatatgaccctgtcggttgctctgatcaaaacacctacgagctacgaaataaacagcaacatgaatgtaactatcaccaggggtaaaataactcttctttcttaaacatcaacttcaattacgacacaggaaagtagtatcatcgctccgctcatcatgcgctcggacattccgccaagcctttggatgctgtacggagtatctgtcctgcaaagcctcatatgctcactagccccttattcgtcaagctcgggagtaacataggcgaagattccctgggatgtccactcgacaacctcatccaaccaaaccaccggtcccccttgttccgggtgctcaacgttaaaatagggacgttcgacttggaattcccagatggggatatcgtcgactgggtagtgttcgtcatcggagtcggaccagtcagagccatactcatcggagtcatactcttcggagccataatcgtcgacagacccggggggtggactgaccgtggagaactgggctctatccgcaaagttggggtgctgcggacggtttgagtctctcaaattgggactgccacttccaatgtcgtcatcgctttctgcgattctattggctgtgtcaagaacattgttttcgccgggtcgatgatggttgcgtgctggagtcgccaggtgaggatgttgttcgtcttcatcgttgggatcggggttgattggctcgtactctgccaaaggtatgcggtcttggtcttgattgacatgattacggttgaagagattgcgtgcaataaattggtacacagggaggatgatgcgacgatggcaggcacctaggtgctgcatgatcgaagcattgtagacggcaacgacgaacaggaatgagagtgtcaggcaaatcgccggaaaggcaagagaagcctctgccatgatgactttgttgattgcagatgtccgtagagccgaacagacgatatggaagatgaaaaatgcatatggatttggggaggaaaaagggaagaagcaccgcgcgacgaaggtcatcaaaatcgacatctaacaactactgtgaattgatgaacaataggctgatgggattttcaaactgccagagaatatctagatatattcaataacaagatttaactattttcattagttgcatctactcttgcatctgcttatctatacaaagtgatatcaataagcaataagatggcaaatccttatactcgatcactgacatcaacatataggtatccaagttacattgcaaaagtatcatagagcaaacttctagtttcacaagtattacttgacccgatgatctcctagagtcacaatattcattcacgatactcagtcacgccgcagcttaattggcgactttcccatatgaccttgcacgcccacacgtcataagcaaatcttgcttatgaatcatataggaaagccagctcgacatttcctatatttagattggtgctacagctctcctatcaacgttagctcaagcataggatacatatctaggtatctcattgtgcagtgagactttcaccattcattgtttactactctactttctttctttggctcaaatcgatgggcttgaaactaagcatctttgtttatcctgatttaaattagaatcatggaatccattgtttcctctcttcctttgtccatgacgttgacacaaaggcctttcatgcattgtataagtgcatgccaaactgcatcatccttccctcccatcttttccacctctcaatcagatcacaaatttctacatatacattactccaatcatcccgttgaccttactaggtgtgttctcatacagccatctacaatgggaattccaacacgaggagataagaaccgaattgttaagcgcaagttcacaccaagaaaaacctggacagaagctgttaaggaaaatattgtacagttcttcatttccaagccactcatatacggtccatttgctgataagtccaagtcgccgcaaagtgccgctctacaggatgcgctccaatgcactcaatgccgagatctgcatattattccatatatgatgagtgcggatattgctgcaggctcgtatatcatatcggaatacccacctttcttcgccagcaaaattgcatcggatgattgtatatctcccctggacacaaacatggcagcccaccaaaataacgatgagacattttgggaagacattaccccaacccagcaacagcgctactacgacaagatcgataccattctcaagaaggcagaggccgagtcaggcaagccaatagatgaagccaccgttcttttcgcccactaccaagtggacttccacatccgccaacactaccttgccccccgaagtattctgaatttatgccgctcaaaggatgatattcgagcgctgacccactggcaatggaagagcgctgtatcagataaaacagcctttgcaggatgccccgactggggcgtgggatgggtgcatgagccgagcaattctataggccagcagattgcagcttggcgtatgggggaacgaaggcgagagaaacatctcgcggaagtgcaggcccggtgggctgagatcagagatgagcgacagaaacagaggacgaggacaataaatattttgttccagggcgcgcatgttaggacttacaagtatgagccatgtggaccgtgtctgacggaggaaaagattgtggacattacaagggaaaggggtgagcattatgaagccttttggaagttatatgacgagtgagggactcattgaatgctattatatacgtattgggttgtttgtttaaagaaaatacaaaatcctttgttcctcctcagtggcgtctttccaagggtcttttttagatggatgttgaagccttttctgggtaattttctgacctttcaattcgtacaataacggccagagaggaatctgaagtcgttttggatatttgttaagtatgtttattttgtctctttcaagtcgaactaagcaagtggcgttctaccaagcaaaaaacaaacaaacaaatagaaaatctatctgaaagacaaggaaggcagtttgaagcgcactcgcccacaatccagggaacgggcgtctccatgccaatgttgttgaccgtctctagagcagacatacccaccaactgcctcacttagcctatatctgaggaacattttcactggcgctgtttcctcgtccgtgaaactccaaagctgcgagtattgtaagactatctcctgaccgtcatccgaggcttgaataatcctccctagcttttcgcccatgaaggacgagactagaacctatacaaatgttagttatcatcaaactgcagagtccgtgaacacccacaggatgaaactggcattcgatgaatggtctatgattcactcgacggatgaaggtggaaacgatggctttcaactcgtgtatagtgattccccgatttgtattggtgggacgaacattagagatacatgtcatgaccagatgtggcttgcgagggcgatcaatgtatcgatattgattcatcactcgccaccattttcgaagcgggtcgtttagactgttcacgaaaggaggatcgccatttttttaatgtgggctatgagttgtcagtttcatcttgaagtgtagaagcatatggaattgcttgcagcctacttacctccaatgttcctgctttctgggaggttcaagaatgaagaaacgggatggcccttaccttggtattgtcatatggcagtcaatgatcttctctgtctgcctggcttgggccaacgcatcattcaccatttcatacctattaatgtcataccgatgcagattcgcaaatgttggagcaacttcaggtgagtagtcaatgtcagaatcattcatgatatcttgtacgctaggaataggagacagtctcagaaattcttcctgttcctgcacgtcaggccggggaggatagagttgaaggagtctatcagggtgaggctgaaagaaggacgggctaaattgaaaagttccgcatttatctggatctaagagcacttcaaatgcttggatgccaagcgcataaaggtattcaggagaagggaagtcaggctcaaagtattcaatgcaccgaaataaagacctgagaaatttatgaggctgaggctgtgcttcggccatgttgacgaagtggagtgaggtgtttaaagaagtaatggaccgaaggaatgatgagagaatgggcggcgtaacattttagaaaccctggaacttacggtagaaggtcttccaatgttgaatgttaaggggattgtaccgccgacccccccttggccgttccgatcccctttggccaattcgaccatcagctatttctgccatttcttgaattttctgcaggtttgaattcttgtttatatagtaaaagatgtacctttctactcacgattttatacttctttcttcaatttgaatgcctaaggtctacaagctgtatgttgaaggccttgaaatataagaagtcactcttaacttactgtgatgcgtcacgtcacgtggtacatcccttgtatatcacgtgcaaagagagaagaataactaagatatagagaagaagtaagtaggaagtgttacgagccaattcgattcagaagaaaagagtgcaattcagaccaaattctaagtacgaagaagaaagggagaaagagaaactatctgagtgtatctgagtgcgcgttcttcccttcttatacccttgcgtttgtcttcgcttaatttcgtccgaccacttaggaaggtacaaggacatagtcgttccttcctcgtttggcaagtacgaaaacgtgaccgttcctgcctcgtttggcaagtacgatccttcccagatcgtcacaggaagtagcctaagtatatagtcgaccctttgcaaaccttgcaaactttgagccttctcgcttagcaatctagcaaatatacaaacagcaataagtcagtaaatatgcaaatcgtcggaaaagcggccaggaagacggtggacgtttatagtaggcggtcagtctatgtacgaattatcaggcaggttggattggccaaaggggggtcggaacggccaaggggggggggggtcgatggtacaatcctatgtctattttgtcctgattaatatggtgggccagggcgttcaacatggttgagggagctctgggaaacccggaatcctcaaatagtggccttgtttttcgagcagggagaaaatctcggagccttcatgtcaggtagaatcctagaggagagaagatagaccatgcaccactcacggaatgaaagggagttttcaagatgctgttacattaggatataaggactctcgtcttgtctgctaggattgactgcccatcgtgcatatccctcttcggtatctatatttctgtctctacggtcaggaagtgcgtcaggccgttcctgccccgtttggcaagtacgatccttcccagatcgtcacaagggccaccagaagccgggccatcagccgtctggtctaattaacgattaacacttccattgacatggtcacacaacgataggtgcaatgcagcaataagcagaattatgtaacaggctcataacagacaggcttttacgcagacaggctttcacgcaggcaggcttcgacataaagagctcgggcatagtgggcgtccactctggaggtggaggcataataatgcaatgtactgaagggagagatggaggatgcggcttaccgatcgagcgggtgggcgcagggcctaatatatagtaattagtattagctcctgataggtgaatctgaccaagtcttttgctcaaggaccaactcaccctctttgctagagcctctgcctcctgctggaggtctttggtagtggcgggggcagagcctggttgagactaatgagcatatggtccaattgcccttttcgagctcgtcacggctggcctcttgggcctggcgcttgttctgtaccaacgaagccccaaatcaatatgattcattggatagcagtcaggaataattttactgggcgcacgggaggcccgagctggaatgcccggcgaaggcagacgcccaccaggcatacacccatactggcaagccagtaacaattctccacagtatgatcactgcgacggcagtgtgtacagaacagctagatcatatattaccgcatattccaacgatacatcaatacgtgcattgtatttggagctgggatgaggagaggtaattgttcaacacttactagaggaggaggatggaggggcattcgccatgctagcgaatgagcgtaggaccagatgttgttttcttttttaagaaaacactgggagcgaccgaaaaaaaaaaaaaaaccttgcagaaacagagtagagggaagattacaaggataggttggtttgttgggtgtccctgcttttatatgccaaggacttcactatgagtgggaacgacaggtcaatttctaagatgatgagacctctatgtctacctatataagaagcttgtcgatttcgccaagactcctggcattgatctatgtttatacaggaactcagtggcagtaatttaaagaaaagctacattctagtcagcgtagaatagcatcaagtcatcgcgagtgtcaaccaagcaataacaaaatagatatttcaaggattatttgttataatgactttccatagaaggtatgccgacctctccaagtgagcctacaacatatatgctcacgtgcagtataatcttgccacatggaagacctaatttagactagcaacggctgagacgaaagcagcccgagtccaacccggggttgatctgctatgaggcattattggtctgcagtgcatggtattcgggaagtcaaagaggatttgacaattgaattcgcccaaatgctcctgctttactggcccttacctacttctcccattccccatactttcgccatttctttcaaccaacggcccataacgacgatcaatcttcggtgtggtgacattggtccaaaggatttcaggcctagaacatcaccatgcttaggccctctcaccatgctgcgttccccgcgaaaaataccagacggacccgagatcttctcattcagttacctctttaggaccaatccccaaactcgagcaaccttaccccaccaaatccagagattgatgcgggcgaacaacgaaagtaatgtgttccaaggctcatgaacttttgataccgtgggaaaaggaggggaaaacacgccaggtacagatcttccggttgtggctggcccctcttggctcattacaagggtatcatttgtgatccattcggaacgctcacaaggctccggtcttggggaggtcacaagcaattacaaagcccgtgtactaggtattgtagtactatccaacatataggaacccttggaattctccatatatcctcgatgattggcacaatgtcctcccacaagcccccggtttttttttgagaggcgctgcgccaccaatgaaacccaaaccatgactaatccttgccatttcgtcactctcatccacggggtggactgcgtgaaacctgacctgagagacgcagatcgggatttgtgacgtggggattcaagattctgcacggcgaacaagggggtataaaggggcctttgctagctacaagattgacgggatcttccaggtacattcgggtccgactaaagaggcagtccgtgtccgtggtctcctggtcgtctgatcagatggaaagacacatgtgtttcggttcaaatgtaccctttatgtatatacaatctgtgtatacggagtaccacacatcattattatccccattctcctttgaccgggaagccgtaacatatgacgtaacgccgccgacctattagggtttccccgaatcaccggcccgtgaaggagaaggggattccatacaaatattataccgatggaaattgataatagaaaccaaatccaagtgctttatatgtcccaaggtcactaagatatatgtaatgaacgataatgacgaagaaaaaaacttccccctcaaaacgaggggaacgacatccactgacccaccgctgcggatgagaaagtgggttgagcctttgggaatttataacgtcgtcaggtcctaaacctgttacccaatccctgctcctctttctctcttcctttttgatcttcccctccatcttcaaatcttacctatcttataacccccccaccccctactacctccattttgaataacctgaataattatgtccaccaaggttttgctcgttggagcagcgggtgaaaccggaggctctatcgccaacgggctgttggataccggtaactttgtaagctcagcttccagggctgtcaattgaccccagactaattgttttatttttcgctgaacaggaggtcatcgctcttgttcgccctatctcggcccaaaagccagctatcacgcgcctccaggaccgcggatgccagattagaaaatgcgacttgaaggccccagaggagcagctcatcgaggccttggctggtattgatgtggtgatcagctgcgtcggtcctgccgaacaacaggatcagattcctctcgccaaagcagctaaaaagaccggtgtgaagcgattcgtgccatgtggtttcatcaccgtttgcccaccgggcggtatcatgtggttgcgtgatgaggtatgaggaatgtgccacggtactttgggtcagtggactgaccaggcttttactacgcatagaaagaaatcgtctacaaccagatccgccagttatggcttccctacaccgtcgttgacgtcggctggtggtaccagctcgcctacccccgcctcccctccgggcgcgtcgactacgccatgacatccggcaacgatgagattattggtgatggcaacatgcccacagcactgaccgatttgcgagacatcggtcgctacatggcgatgatcatttccgacccccgcactttgaacaagaagatcctcgcctacaacttggtatcctcgcaaaataagatctacgagctcatggaggaactgagcgaggagaagatcgaccgaaactacgtaagtcgcacagacgctcggctccgaatcaagtcaatgtggctaaccgattttttctttttccggagcacaggttcccgaagaaaccatctgcagcagagtcgtggcagcccgacaagccagtgaaacctatcccttcgacccaatcaagttcattccgcgatacctggctgaatatcaactgtcgtggggaatccgcggcgacaacaaccccgagtacgccaagtatctcggctaccacaccacacaggacctgtaccccgatttccaaccgacagatttccgcgagtatcttgagtccgtcattcgtggctcggctaagggagtctacaccgatcgtgtgatctcacggaagcaccaacgacacttcccgcgtaccgagtccagcgattccctctacacgcgcatattccctcgcacggagtcgagcgactcgctcatgtcgcgatgaatttatgaataggaaccatttttacgtatcttgcgttacctctccacctcacccagggactgttccagacaaacgccggcccggaaccgctgccattggggaatatttgacaagacttttatgacctctctcttctccccctctgaccccattcgacggggtcatggaattcagtatgcaaccgactggtgctttttttttctggggtgtcgacacccttttgggcgtttgtgatgttatggccttttgatagacgctggctactttcggtgcctcctcgatggcttggtggcagtcctcaagagctggcatatggaatgcttctattttttgtttatgccattcaatttcgattgtcccatgaagggatttctgcatatagaaaatatatcccaatcctgatcccaatcaattgtgcctcgttctttcccatacttgcacttgcatcatcactatcctcctggctccccggggtcttcttatctgggctgtccactcgatctctgatctttgattcacgtttctggtacctaactcatttgctttacctaatcttaacagtcagggattcatacctcttttttaaaaaatatactacctataggagatgtttccgcgacgccgaccgggatctcgatcctctgcctgcgaactcggacccatcagcgtcgagccaacgataccacaaacaatcccagaaactcatcagattgaacatgccctaggcttcaccgatatatacgggtcattgacaccccgtcaaatcagcatcatcagtctgtaccctccatctcgtacggggacttgcattttaacacaggtttgcagctattggatctgcaattggaacgggcttgatggtaggtactggaagagcattgtctatgtaagattggttcattataccgagcggattccttctgtgctgaaatttgctgactccgacacaggagcggcgtacgttattcccaaaaagcttatgagcgaagatattgattcctcgtagccggcagctattataatctcctacaccatcgtcggactcgccgtttacctcgtcctttctgccttgggtgaggtgggctcttggttaccaaaaccgtataccgttgcagaccaagccgttcgattctgtcatcctgcacttggattcagcttgggctggatgtaagtcccccttcgcgatgagaattgcgtctaattgatttattactgaccgcgcccctagattttggctgaaatatgctgttgtcacaccgaatcagctcacagctgcagcgctggtagtctcttattgggtgagtgcggagcgagtcaaccccggtatctggattacggttttcctttctgtcattgtgattctcaacttcatcaatcatcgcctcccgagcagaattgagttctatgtctcttccttcaagcttgtcgtcatgctaggactcatgatactttccactgtcattgctctgggaggggggccagatcaagaccgaaaagggtttcgatattggtcgtaccatggtgctttcggccctcaccaccatcatcacgcgttgctagagaagttctacataacctgctcgacgatgtcatctgctacgtttgcgtacatcggaagcgagcgggctggcatgactcacttcccgaacgttcgtaaagctacctcgagggccatccagaatactttctatcgaatcatggttttccatcttctagcaatcacccttctcggcatgattgtcccccaggactcggtgtctgtggcattttctagcgacgccaatcacgaggctgccgcatcggcattcgttgctgctctgtatctggcaggcatctccgtgctaccggacatgttgaatgcattcatactgttattcgtcctgtcaatcgcagactacgatctctatctggcgaccaaggcaatgtgcgacctcgcagtgaagcgccgggctcctgctttcctatcacgcactacccgaagaggcgtcccgatctacgctttggcggtatgctcgtcaactgcaacattggcgtatcttaacgtccgccaagactcaactgttgtctttggatacttcgtggacatggtcaccatgctcgggcttctgacatggatttccattctcatcacccacatatcttttgtgcgagcgcgaaaggctcaaggtattcccgacaaagctctagcctttagagctcgctttggtctgcctggaacgtgtttggctctcattctctgcttgttcatctctgtcgccattgtctttgactccttcagcttcgattcgggcgttcggacattcgacgtcaaatcttttattgcctcgtacatcagtattcctgtctacatcatcttgatggttggctacaagctcgctgttcatagtaaacacgttgaccccaaggaggctgacctatggacagataagattgagccggagattgagagaggggggggccctagctgaagggaactgcttgtcatggaagccgttattctataggtcattctggttcgtccttggggatcgaaattattggtcatttttgtttatccacggggaaaagcaattaccattcgctatattctcctgaatatgtactccacacctacatctaggtgctgactcctgcttcaacttctaacaattctcaaaataacgactcatccactatgtagtatggcgaacagcgtctcacaattattagcccgtgtgactgatctagaaagctgcaagacatcagccactatgcagctatcctcccgaatcctcgacatgtaagatgtacaattgtcacagtgacaggccaggtggagacgctaataacatctacccggagttggcgcggataaacagttcttctgcacagcgaccagccgtggcctactccatggagtaggttgaacttcaattgacgagtcaagacattctactgatataagacgctcgtctcctcaagtcctcaatcctcaattctgattcttgggagactctgtataaggaaacccgatgcatctgcggtttgtttaccccaccatgcaatgcgctcgcatgagactgacaagaacccccagacgctgttgaatcttgtcatttcatcttttatctaacactccaacacaacaccgccaatttcgtttcctttgaatgggagctcctgtgctctacattccgatgaacatggaccaccatcccactaccccacaacaccagaaagaggatttccgcacttttatcaccagactcaacatcaaatttagcctcgagattcccctccctggaattgagtctccttcggcgcgggagagaaacaccagcctccctagtcagatctacaagcacatccgcccgctgttcttcaataacaaggttgacaagaaaagcctaattgacaatctcgaggaatgggtccgcgggaacctgccggccgcccagaaccagaaccagaaccggaatcatgtttatcaaacccatgcaggtcgccgagccagccaacgacaccacagcgaggaaccggcgcctccgatctcgctcaccggccctgagaaggataggtgcatgaggcagctactagtgctcatggaagatgaggaatatctgttagcgaatggccgtgtcgtaaacacgaaaaaaaggttagccgctaattcttttggaggtgccaaggagttatcattaaaaaaaaaaaggtttgatgatgatgaagacgtggagttccataccgcgccgagttcccctgtgaaggggtctgtgctggctcagtcgccgctggggaagaatgcggatgggagtttgcaattccctgagatggtgcaggctgcctttcgagggccgaaggagaattatggagctacggtcaataatcgtcgtgtaattcaatctcctgcgtggggatcgggaggaatcgcatcgccgacgaaaattcaagttcacccgtcgcctacaaagaaggatggaccgattcagtcgccgggacataataaagagaattttcattctccggcgaagtattcggggacttttcctccgccagcaaaggcgcaaccggtacatacacaccaaccgctccctaagagagcggccactaaacaaccatccaagccccaaggcaatattccccctcctagggaattgacgagcactttgtcgccagcgaagactgcagggggtgcgcaaccatccgcgaagaacccaggatctgtcttgtcgccatccaaaacctctaaaacccccaaatcggtcaaatcaccctcccaatcgccattgaagcagatggatcttcgatcgtttgggtttggcaacagccccagtaaagaaacttctcctccccgggaagatatcgaattcaaaagaccttctttatttgaaaagcttagcgcggtatccgatgaatcgaagcgcaacaatatgacggagtcacctgctcccagctttgcagcgactacttcgtcggtctttatgtctcgcgatagtagcatgatgcaatcattcgatactgtcgcaacagaaatgaccgagccaatggatacccaatcaacctatgcagactcgattgtcgggtatatggctagcgaagagatgcaaagaagcgtggatgctgctgctatctccatgatggtagctgccgatcccgccgagacggagtatgccctgaaacaagagtttattggtgagctgttgtcctacggcccgttttcgggagaagaatccttctcggcgaaaatcccattgcgattccgatatgagctggaacgtatcggacgtgcgtggggaattcccttcaaacagatactcgttggcgaccgtgttaccttcaacactcaagatgatttctggtcatgggtcgccgggcttggtcgacgttatggtcatccgctgccagagaaatcgccccgtcgggcctgggatgctgctgttggtgatttcaaatcagataagcactcggaggtggtcatactctcaggagatttggactggtgtgacgacaccgagtcgggtattttcaaattgagacttaacccgctcaagccagagcggacgtgtcggttccaccgaagatttggttcggatagattcctgactcttaccattccagccgctgatcggcctcccagccatcagaaacagcctgcttacccatctgtccttcgcgagagtattgctacctggctcacgcggaatgatcatcattgcctcggaaggacgtggcgggctttctatgtcgaggaaataaagaccaagcgaaaagtcaaggctgagcctcggttccgggtcgagttcttcgctattgatggcgaagacttcgttcatgggctccgtttaccaatggtggcccctccccgacagcaaagtgataactatactccgatgagtgtagacgctttgctggaatggcatatgcccaagactgcgaatgcgaatcaaagcaactgcaagctcttccagcgtatctctcttggtttgtcgaagacatttgcgacggtcaagttaaagccgacgcaagtgcttcgtttgagagacgatccaacccgggctgttatgaatgatggatgtgctttgatgtcgaggactcttgcgaaccaaatctgtgaccaactgggcataaccaccgccacacctagttgtttccagggcagaatagcaggcgccaagggcctttggatggttgattcccacagatctagtatctctactgtgaacgatgatgatatctggattcagatctcggactcgcagttgaaaatacacccccatccggaggaatggattgaagtggacgatgacccccatccgcaggaatggattaaagtggacgatgagaagttgaccttcgaagtagtcaactgggctaagccgttgcaccctgttgaccttaatatccagcttcttgcaattctagaatatggagggaacgtgaaggagtatattaccaaactcacccgtgatggtgtgcagagtctttacgacgacttccttgaggttcttcgatcaaatagccccgtgctttgtcgagccctgcttcagaagctcaaaccctccggcgaggacggaactggcaaatcccgacgattagagcagtgggtttccagtgatgctgagtccattattcgtttctccgaggctggctttgctccgcgcgatttctttccccttcggatgaagatccgtaaattcttgacatggcttcttgagcgacatgtcgaagaactcaaaatccaggtccctctttcaacgtatgcttactgcattgcggacccatatggagttcttgggccggacgaagtccactttggcttctccaataactggcgggatccacagggccagtttgaagacaacctcctggatgggatagatgttctcgtcggccgacttccagcccatttgccgtctgatattcagcggcgtagagccgtgtgtaagactgagctacgtcattttaaagacgtgattgtctttcccactacaggggatttccctctagccggtatgctatccggaggagattacgatggtgatagaccgtggatctgctgggatcaaatgattgtagagagattccgtaattccccgatgcccgagcatgaatatactgcagagcattacgggctcacgaaacactccgtcccgatggcttcgctgaactcgacggaggactttttggaaagtacgttctctttcaacctcaacctttcaaacttaggtcaatgtactgtcgagcatgagaaactggcatacgatgagtcagtcgacttttcgggggcgaaagagctggcctgtctcttgggtcatcttgtcgatggccggaaaggtggagttcatctctcagagcaagcctggaaagaataccgcaagaccattagccctaaccaacgagcgcttcccgcgtatcggaacccagagcgcaagtccaaaccgtcgaacattgttgacttcctcaagttcaacgtcgcaaagtcggagctgcacagaattctctctggtctcaacgaggcgttccccgagaacgatatccaaaaccagctcgatgaggacctcgttcgtccgtggattgaagcagatgaagcatcgaagaccaagtctgagcacaatcaagaattaaaaaacgccctcgctgatgttcgaggggcgatcaacgaactataccagcagtggaaccaaggacactctgcttctactgacgaattctctcccatatcacgtcaagctgccgagaatgcgagtgcactccctcctcctaagacgggcagacatccgctcatccacacctggcaaaacagccccaatgagtggcgacggttggtagcttcatgtgcctaccgtcgatgcccaaactcccggtttatcttccacgcttttggcgagacattgtgcgagattaaggcatccgtctcgccatcccgccttgtcactaatgatgtgatcgcctgctaccgagtgaatcagaaaatggtggcacatatcacggccaatgcattgcctgggaatgacgccgatgatgtagatgagtatgaagacgaagatgccattgaagccatgctatccttttaaaggggtcattacgatgatggattggaggacaaactgtccatcgaataagatacgagtgacgccagcgaccctgtatttgatctgcccattttgattctgagcgatattttttcctgttactgttgaacatcgcatgagataccttgttgttttgcacgtgttggagtcgatatatagcgttgtcccccgtcagatgttgtcaagacttagaatactttgaacaaatcataccatcagacttttgcctaaagactccaaaacactatcaagtactccatagagaaagttcatcctagtctccaaatgtcaatggcccccacatcacatgccaagctcgatatgccgaaccaggcccaacaaatataagattgggcttataaatccattgaaagaaggatcatattggtgctgtgcccaataataaaacacccaaagcaggctcgtaagtacatctcgtaccggtaggccaaagatcaataaatttccttccatgtactccgtagacatgtgataggacggagcaaagtcttccgggacattgtccatctacattgtacattgtatgcgtacaacgtacggaggagagggaaaaaagaggtgaaaccgaagtggtgaaccgaacacgatgcataactagaatttcaacgtctagttcatggagggaaggtgtcagggatcaagagcaacccgagttgttctcgtattcggattgtcgagtagattctagcacatgtagggatacgagacatacattggcaatgataaaaatggaaacatataaaccttggaggggtttaggtgccttgtttcggggaccacggcgtcttctccgtaggacatttgtatttcttatcgtgtataataaatagtatgcgttgcgatgggtgtacatcgtacttcgtcggaatagaaatcctctattgaaacgccctacaggcaggtgcagagtgcgcccatcgtacgcagggcaaattgttgggcacttcagacttttcatatcgaatcaagtaaataattttcggtaagattgaagttccaagaggggcgaaaggaggcgagtgtgttggggcaaggaacacctggagatttggcatgtgatgaggaaaggtacatgggcggccataacggaatgtactgccgagcaggtaccgtgggaatgtgattacctcaccttcaatgttccttcctaattgggcctagtggacaagtgacgctttttcacgtgaaagacgatacgatgcgaaactccgacgtctttgaggttcattgcactctctctctatggacgatctgtgacccgccatggaacccccccaatccgctaggccaaaaccacctgcccgaaagaataacgccacagctctgacatcgtccaattcacacccctccgcgcatacaagtaacctcacttcatcacttacggctccaccctattataatggtcttccatctatgatggatatcgataacccagaagaccggtctcgtcgagctgccagtgtattatcgatggatgatctcgaggccgcgcaggcccttgaggggcttcgctccggtacgttggctctgatatccccgaaccggcccactaaaagtgtcgcaactgcggttttcactggattcggatggctgtgcaaccgacattcaactaatctcaacaatagattttggacaaacgcctggaacaacgcggcaatccctccccatcacttcaccggacccaccaccgccagagccactattgtctctgctgacttcctcccatccacttatctcctctgctatcaacggctcagtttctgcctacgccacgtcgaaatcatattcaccgcgattcaagtccggtgctgagttcatcgagcgcaccatcggatcacctgtcgcgaacaccgtcggtacggtaggccgcaaaactggtgtcgagagcggtctccgttgggcgttacagcgacgagattctacaggcgaaaattcacacactaaaaagcgacgaaagatggatgagggtgtgtcgccgagaacgatgaatgcggagaagggacacccaccgcgtacacggagctcgtccgatctctccatggccgagtcgctccccccgtacgacgaaatgaggtctcctcactacgaagagaaaccaagaagacgtactgaaccgacatggcaaagccgactagttatttcgacctctggactcggagtcgccatgagcgaggaatcgctacgtagtctgcaatattgtctgacttggcttcgatgggcaaatggccgactaggcaagtccattgtggcactacatggtgctgtcaacgagtgggaaaaccaaaaagcacgatcacagtcggatatcgaggcagggggcaatggccaagaaagtgcctcgttacttatccagcgcattcaggccgtcaaggccgatgtgttatctaccttgaaacaggtagtggatgtggtttccaagtatgcaggaggtgctctgccagagaatgcccgccatctagtgcgtcgacacctgacgtctctaccgcaccgcttccaggttgcatccacatcgcagccaccaccagactctccagccgcctcctctgatgccacaatcagtgcccatcgcatcctggtgctggcccaagagggtctagacatgatggcgcaagtcagcggcgtcgtcaatgacacattggtcagtgctgagcactggtgcgagcggcttggccggaaacgacccgagaacggagcttcatccatgacagagaagcagggcgagtctgcttccgacgctcagccgtatgacatggatgtcaaggagtctctgccagagaatgcgattcaggacgacgtcccgatgtctggaatggcaaaggtatgacgttgtccaagagcttcctctcgtctctttacatattcataatttctgtcacttcttgcctcttatctcggcggttctcttgtttctctcttatctggggtcttcttttcttttttttttttttcttctcatgattgatatcctttctgctatcttcattccatctggagtgataggaaaccccttggaaactttggtgtttgtttgtttaagcgtgcaatcattgtctatcctactattatagttatggatgttggttttcggtatagatatgcgcaagaggctgcgcgctcaggctgaatgaatgcaggctattcatcaatttacacttgagattttcaggagatcgtgtaagcgatctaaatcgccggggcctgctgaacacatgttttctggctaaatcggcccggacctgtcaacatactcaaagggccgtcaatcacatgggccgctatgtttgccttttcgttctagatcgatatcatttcaagcttatccacactgggctcttcgagcgggccaccccatcctatggcttcaagaccacaaataccctctgaggaaacaccaaaacacctgctaatagtcaggcaacgtttcactgttgacataaaatgtgtcataggtgctgctgaagccattgaactgggtagcagtggtacttgtatatgctggaactcagtcagttctgaaaatccagaccaatataatatggcaatactcacctcccatgtttttatatttgagccaatctccaaccttgacttcagaatcaagcgtcacctcgcgcacaacacaatcggtgctgtcacatgtcggtccccagatcgagtaccgatgggggatgcacaaagcatcccctgatttgggtttatgcaagaaccccctggctttcttactgaccaaataaggaaccatgatctctttctccataatcacattcatgaaatttccatatatgccatcattttgataaagcatgtctggaacaccagatcgagcagcactcccaagctgacggcgacgtgaaatcactcgacatacaagagtatacacactacgagcgaaaaaccgacctggctctgcgatcgttgtgataccagctggaaactccgaccgaattgcgtctcgaataataggcgccatagactcgaagcaatcgtcttgaaagccaccgccgatatcgagaattttggggtggaaacctagacgttccgcttgtgagaatgccagacgtgcatctttgatgcccttgcaaaatgacgctgggttgatagcacccgtccctaatagttcaggatggtcaatacatctgaccagctaagaagtccgaagtaccccggtgcttaccaacgtgaaagctcacaccaatcacattcaatccaagctcccaagctcttgaaaggagttcctcggtcgtatccaactgcgcaccaaacttttcgcccagacatatgaacgcaccctcgtcattcgcgtagatccgaagcaacagctgagcttccggcatgtgtgccttgatagtatccaattcgtcgatattgtcaaatgttgtccgcaagacaccaatatcgcgtgcgaaagctacggcggcgggtgctttgcagggattggcgaacagaatccgggctggatctacaccgaggctgagaactgcgcgcatctcttcaatggaggcgcagtcgaaccccgtccccagttctgcgaggactttgaggaaggttgggtcgcaattgcatttgaccgctgtgggaagatgttacttttctattccaaaaataggaacggactagaagaggggtgttgtaccgtaatacggtcggattccgggcatgttctgggtccaacgacgatgctgtcgaagtacctggcccaaatcggcgatgaagaatgattcgtcactgccaacgagagagcgtttgactatacgcgcaatgtgactctcaattgcgaggtcgactagctcgtctggtgggagatttcgatatccggttgcatgtataaccttgctagtgagcgcagtttcactaagagcagggagaagggccatgactgtggagaggagtcgatcgagaagaactggggaaaacggagagttctgtaactgaaacagcattacaagacatgtgtcggactaaaatacaaagtcctggagtatatgaatgttttcgagtgctgcactgcgctcttcggtgaacactgcgaatcaatcgtttagagaagctcggatgaagtgaaaggtgaagaaacgccgttaaaaggcaattttgcacgcaattgaaactctgcattacgttggatctcacgggaaggaataagcaataagtcgcacggataaaggccttgctttccagttaacctgtgagggaaccaattatatttcctgaagttgacgtcttgttttctatgtagggcttttcgtattctgggtgaagatcagcaactagtgctagatcgatcgagctgatcctgcacgattcaatgttggggatgaagtactccatatatcggacgtgatcagctcaatagcagctattatgtggattatggtggagacctacagggtcgagtgaaggcgtggagctgaatgcatgcacggagtagagtaacatcgccacacaagtacataaaggtcaaatctacactgaatatattggatagtgtgaccagaacgatggtaatagtatatttagaatacgaagctgaattgcgaaggtgactgatattccccgggaatgtggaatcgaactaatgtctgtgtctctgtggaatgaacagtatacttgatagcaacgcattcaatactttttatgtcatagaaactgttgagtttcgacatgcaggaaccactccatttccagatgtgatgcgtcgatctattggggagcagctgaaagccctagaaaaagaaatgcccagcattctttcagtcgaagatgagttattttcgagacctccaccccagattattccgctagggcctcgatcttggtgctttagctatgctcatcggctttctcgggctattatacggttacacatcggatgcaccaagcaacacatgtcgaacttgggaggcctcgagctctgggattgactcgtatatttgcttctttcaaaatgagatctacctagctatgacctctagggtgtcagctgtctatagatgggtgttccttataacatataatattgaaatccccgctggagcttcctcaagccccgaacactttggtttcacagactagttggagtcagaatgaccgggaaatggaatatccgcttcaaatatatcttccatatatgctgtgcgatgtctgagtaagactttgtccgttcccagacctaaaatgtgtatgcacgttgacaaagccttgaagaccaatcttatttttaaattcactagaaagccaacctccttcacaatgccacgtccttctactcattggtcctcacttcattacaggaacctgctgagtgacgcagtgaagcaccccaccagtaagggggatggcgttggcatacacctgccgaatcacccgctcagggagcaagcgctgaaacatttccagcgccttttgatccctttcttcgtcaccgaatctggggataatcaggcctccattaacaaaatagaaattcacataactcgccgctagttcgtcgtgatcggatttcaccaagcctcgtgggtccggctcttcaatggtgtggatctgcaagcgccgacccttagcgtctgtctcgcggtccagaatctctcggatctccgtagacagctcctgccacaggtcaatcgcaataggatgtggttttgagtaagcgatgacaccagggcgcacgaatcttgcctcagcatccatatgcacgtcggtaatgtcaacattgcgccgtcctgggaaccagatcaccttttcaatcccgagcagccgcctcaactccgtctcgatctcggccttggacatccccgggttgcgcacatcacatacaatgctactctccgtgataagcagcgttccttcgccgtcggtaacgagcccgccgccctcggcgcgaatcggagtctcgatctgcgtaacggggccgggcttgcgatcgtgctccattacccaccgcgcaaaattggtgttttcctgtagtgccttcttgtccatcacaggccatcgctgaccccagcagattccgtcgtcttcgggtttcttcccgccccattcattgaagcggaagttgattgcgaagcgtcgattcgggaatgcgcctatcttgtcgcgcacgtagactgggcctgtgtcgcggacccagcagtggttgattggacaggggatgatagatatttttgttgcgtctttcacgaaagtctggactagggactcggccaatgggatgtcttcgggcctcacgtatagccgaaccggttcgaagtcagtgatcgccgccgctagttgagctaattcattgcacatggcgtcaaactgatcggggggtagggaacatcgagatggtaatcccatgattgtcgcttcatgaggctccgactctgccgggaagatgtagctgctttgaactttgctctcattactgctgatgtgagagggttggaaccaggtacgtgtagtagtatagagattcgacagaaatttgcggaatcgctcgaatagcttcatgctgatggtcgctcgtgagttctcgcccttctcgtatcaagctggagtttctctccttcttaaagatgcaattcggttgccttcgtcctcattattctcgcacatcatctatttcgtgtaactatgagtgcctcatgttactcacagtttcgaagttgtgttcttggtgcggagtggtatttccattaaaatcaccgagagataacatgatttcggatatatagaaaggattcaggcggaagagatgttaagaggaatatatatagcgagggtttgtatgtcaatacgaaatacccaaacgaccgaatagctagacttcacgttcagtggtgcgagagagaaattataatctcatctcacttctcatggtctcaaaacaaatgcaataaaaagccacgtttgtgctactatatacagcatggtgcatgctactccgtcagcaggggttcacgttccatctcctcatcggcagactcagtccaggagacttcttccataggaccactgagccacaacataggcatagccgtaaccgcagaaagaactcccagtgcaagagtcataactttccaaccgtatcggaactccacgaatccacctaccataggtcctaatgccaaaccgccaaaatgtgccatattctctaagctaaaagcttgagccacggcacctctgcccccaaagacccccgggtctccagcttccatgtcatccaggacacgctgcatctccactatcaaggccggctcgcttaaatcgatgcacattccaacaagacacagaatcacacaaagaagacctatgtgggatggtgagttttcctcaacgaaacgaagacagatcagactcggggctagaatggcaaagcttgcgaatgtgatcactctcgcaccaagacggtcagatagaaatcctagaaagtaggtcagatcatgcaacatagtatgataatatgaggtcagttaccaaaaaaaggttggaaaatagcggctgcggcacctggcaagaatataagcccagcgcctaaaacattccagttgaatgtgttctccacaaatattgggagtgtctatatagcagtgtcagtacattccaatataaaagactgaattccataccgcatcgaatgccgagaccacaagagcgccgactgtaactgcccagaggcaaacaagaacccggggctgcttcaaaatctttgccagcgcaaaactactcttagaaatttccgtgatcgtatccctagtgcgtatagtctcaaaagttccatatggcggctgctcggggatataaccattctcctgggttggccgctcgccatcagtgagacacagccaacgttgagcaatcctcttctcaacaacagcgagtctaagaaagaagtcaagagcaacgattccgaaagccataccaaaaacggcgtagaatcctccaagttcgtaaactagtccgcccagcagtggaccagacataaagcccagtgtcatggcggtgccaagatacccaatcatctgtccaagactcgctttatctactgcgtctgtcacaattgaaagaccagctaccgagaccatggccgttgctgcgccttgaagcaccctggcgatgatataccatgtcactgagtgcgaagctgtcaagattaccatagatgcgaacaacagcacgagtccggatagataggggccctggcgtgttccagagacgtcaagtatgtatccgaacatcggacagcaggtaaatgccgagacggcttcggcgatgaggaggacactgttccaatattctcctatcaaaagagaggctattagcaaatgattatctgtcctcgtaaatcttcgtactgtcttcgaatgctaccccagctcgtaaaactaatgcctgcggcatgacggggacaatctgtagcggtcaggtaaatatcaaaggtactagtcagagcatgtgtaccatagcgtagagaaagagatccttatgagtttgattagctgaagcttagtttgtctggacaggggatcggggaggataccgtgaacattgacagagaaatcgtcgtcactataaaggattgcgatgaccttagcggcagcagccacggtcgctggtcgcgaagcttcaaaaatggcttcgaccaagtcatgattagtgacctagttcaaacactgtgcgaatggtatgaggatatgagttgaataggtgggcttgttcttctttaatgttctctttctgtatgcagtctagaacttaatctgcattagcgaccgcaattgggtaaagattctcgttgatgtgttcaattgtactccgcagctgcatttacaatctgtttttgcgctagacactgcaagggagatgctcagatcactgctgatctctggggcactgtggcttagatgtgtgaatgacgttgctgcatcacatacaacatataaatttgacagttataatgaatatagatgcctattatcaatctcaaatccaacattttagagggaaactgccggaaccctaggtcggacaggtgtcttcataatatatttctggccacaaaccaactctgtgaaacgcaatgacatatctcgagaggatttgagcaatgcggtttttattattgcgtagtcgagctagtctttgcgcgctgtgctgaagtaacttgcaatcagtagcctgtatatccaaggccgtgaacttgggctgtccaccatttttagccatggtaaatattgcagtttccctcaacaaatcccacttatacgacatagcaggctctttttcttcctctcttagctcttctgcaccatctatcaagttcctggctgtttcgttacattgcttcttagggactgcgcggtaaaacatgaactgaatgtagatgaactgagttactccatgattccatcggcctagccaatctgtcacgatgaagcgcatatctccgtgataaatggagcgcaagaataggagcctcgacgttatttcccgatcctactttgtaggttacggagtaggtctgtttacatcagtttgaaaagacgttggcttcttccaacataccttgagcggttactaactatcaggagattggcactcgttgggtccatgattaactgaagaaagtataaatttaagcgaatagaattctctaaatgtagcgaactggcgggagactgcgtacgccgtcatcttcgtttgacttccccccccccccccccccccccccccccccaaaccttacccgcccgcannnnnnnnnnnnnnnnnnnnnnnnnnnnnnnnnnnnnnnnnnnnnnnnnnnnnnnnnnnnnnnnnnnnnnnnnnnnnnnnnnnnnnnnnnnnnnnnnnnnnnnnnnnnnnnnnnnnngtttccccccccccccccttcacgtagttacaaacgaagtcattgcgagatacgttgaatggtggggctagttattactatattgcattaatgccttatgactcttgtacgtagagtttatttatgcttacaggtgtaagcatgtgttcattctccacacccacagttttaaaatagtacgcggaacaagatagagccgtcagtgctgcgtatacagtataggtggggcctggaaattttatagatggtagttggaacatgctaatgcagcccaatatcgcttagtaggtcatcgttttgttactctagaagtcgatttaagatgagaagaaggtcaatgatgtatgtattaggtgagatattagaacttctctgtgaagcatcacaacagaaacgatctcaaacaaacgaactaacaagtatggaaacaaagtataccacatagctcctgtaacttttccatcgtgcaaatctgactgactccaaagcgaggcgcttagagaatggagccaagggcaacacaaggaagaccggcaccgacaaggtcgttgctggcagtggagggtgagttggcgcagcaggcaatgttctgcttgcactgctggttgaggagatcctggacaccgacaccaatgaggacagggactggagcgggttagtgagggagttgacaaatgtatagaatagtaaatcttaccctggaggtcgagcttggagcactggtcgaagacaccaaggccggaagcaccagagccggaaccgatgaggttggagagggtgccggcgaggatgccagagttgatgtcggtggtgtcaccggcgtaagtggccttgttgcagcaagagagctgagcctggtcaccacacttggactgggcctgctggacagtcaggctgtcgggaacggggaagcgaggagcgccaccgttctggtgctggagaccattgttcatgttctcagcgggcatggcagcggagaagccagcgagggcgaggacaacggcggagagagtgaactgcatcttgaaggtagaggattgaaagattaaaatcttaaagatataaaaaggttttaggaggtttggaagatagaaggttgagagaggtagagaagtagagagctgatggataaaaaaaatttggtacgacctggtgctcgccttttatcttccgttcacagtgcttgggcacgaggtgatctcccagtattcatggtgagggccaaatacaaccctcccatttttgcggatggaatgcagaacgcaagggtttagtcccgggcctgccccgatgatctccacctcctagcaatatcattggctcatcctcgattcccggaatttaacaatcaatgagatgctcccccttggcccctggagatgcatgggtcctgcattccgccctgtcagtggtatctgtcaaggttaccttacgccctgattcagttctaggatgtccaatcctggcttacatattttgtaaccctgcgagcctcacatgaacccctaatcaaacgagagcgagcatacacgtacattaaattagagatccggattcagagtccttctagaagtgatcaaggcgtggacaacccctaccgatgaattccctacagttccaaaagctgcccatgcgcaagtatttgaccatttattgtctttatcgctgattaacataccttggaggcgttcgggggcgttcgggggcgtcctggtggcagaaattgtccgatatggtgcatcttatttccattccaggcatgattatggcagcgtgtctttgcggcactttctaccttgttgtatctttgcaatcatgcgtaaatcacagtagagaccccgttcaattgccgtcccttacccatacttggatccaccgtctacctatctctcagtcccagggaattcgagatcgtcggacccgtgtcgatcatggttacttcggattttctaccctgctcccaggcatagcgtgtgatgttacgatgggcaaccgctgatctacactctcccttgtcgatgcaaaatcaaagcatcacgggaaattacaatgtatggaattgcaatgtatgggccttcagcatgttctctccatcaggcttggtctagatcgaacgttttcgggtctgatgattacaggctataggatgccaggtgatcctaatcaaattgtatttgattgaagaatgaattgtatactctaatagggttagcagtagagagtagctcgaactgtaccttgtcacctcgtccaagaagttgtgtctggtgtctatctacgatgtgtgtagattgtatgagaatgtttgaatgtttgaatgtttgaatgtttgagggtaccaccataaagaagcagactcgtagactcattaaggaaacgagtgaaatgattccggttcttatatgttgtagtgtgctataatgtcgatataaatatatatctccaacgaatgtcgaaaccagagatattatcccgcccagatttaactctttaaataccacatgctaaaccatcgatcaaaatgcattgcttagttctactcatatctttttaattagatcattgacgattgagccttaatgcttcaatggagaagcagttcatccgcatcgggaggttgttcatccgccactaaaccactttcggcttaacgtacgccaccggtctacctgtattccgtactttaacctcactttgctactatgtatgttgagtcggaggcggataaatatcaaagggtcaatatgagtccgtcgagaggacattatataccgatcgctagtataaggatgcttgaatcattagggttctatcatcaacattgcaatccatttcgagctctgcaatacaagcaaatcccaagctccaacccactctaaaattcacaatctgaatcccaaaacctacaaaccatcaaatcctagaaatgacagccattgcctttttcggagcaaccggtggctgcaccaacgcatgcctgacctacacccttctcaacggttacaacgccagagcgctagtccgcacgccctcgaaactcacgacactgctcctctcacagcctgacataacacaagatattctctctcgccagctggagatcatcgaaggcgacgcaacggacgtagaaagcatcaagaaaaccctcatcacaaactccaacgcacccaatggcgcatgtactctcgtaacaagcgtgatctccggcctgggcggcgcaccgacaatttccttcaccaaagaaacaaaatgcgcaaagactcagatccgtactcctgctctgccacacattaagctctcgaacccgcacatcacagaacagtcgacgcgcgcgctgctgacggcgctggcgcagattgcttctgagcgttttgcctcgctcggggcgtatcgtgccgttgcaccgcgggtcactgtgatctccaccacagggagttcaggtagtaataccgatgtgccgttctggtttagacctatgtactctgtgctcttgccgattccgcatgcggataagctgcagatggagaacttgcttgatgaggaggttggactgggctgtgccggggtgcttgctgctggagttgttgttgtgaggcccagtcttttaacgggggatcatcgggttcctactgttcgtgaggggaaggggggtgaaggggtggggctggaaaaagtgagggttgggacggagagggcccctgctattgggtatacgatttcacggggtttggttggggagtggatttttgaggagattgttaggggtggtggagggaaatgggttggggagaaggtcactatcactacttgagcttttcgccttctcttggtttcgtgagattcacatatttttcgttgtttgagaagatagctacgttgagtgcatacctggaagtgccacaaatttttgcatcaagtactcaaaagatcagctgtattcaaagatcaacgttatatacccaaaatcacaagtcactgcattgtatcggctaaaagcaaaacgcccccgtaggccagaaaacaaaatcacagaaagcaaatatcatccctacgggagacaatgaaactccgtataaaaccaacgataaaaaaaaagcatcattaacatctgatgatctgtacaggtggggcaaaccttcctaatgcccatttcatgacgttcgtgagagagaacatagaacttgctgtgatcaggtgcccccatgcggcgctgagcggtcgatatgagcactagagcggccaatctgagcactggaacggccaatctgcgcaccgggccgctcgatttgggtactggtccgctcaatctgaagactgcggcgttcctccttgatcctcttcttttccatcttcctcatggcttcttcggtcagctgttggcggaacagccgttcgacaacatccttctttcgggtgcgccggtcaccgatcatgatcatcacaccacctgagatgttacaagtgatggagaagcaaaggataaccgttgttagagcgaatgggcgcctatgagggtcctccatactccaggtacaggcaccaagagccatttggagtatagagtgacagtcgaggatgacgacaatagcgatgagtaagcgtagagggaaggcgtggtgggtcatagtttcgtgcggcttatagaaagtatgcgactttgcgaacttattctggtgatgcatcaatcgtaactgttgatgagcactgagaacagaaaattcatgttcctcttccttgactgcttcaccaaattcaaggtcggcgtcggtctccggcttcgacggaagatcgttcttatccttgaggcttggaagggcccgcttctgacgaagtttccacgacttgagtgtgtaatgggcaatgaaactcatgtgatatgtatccacggcgcggaaaggagccagtccgtcacccatgatggcgaacagggcaactaaaatgttatcgatgatattgacaacataactttgtctggcaccgagattgatccaacctgaagtgaccgtcagcatagtagatagaaagtattaggtcagaatatctcaccaatcaagaaaagaacccaggccagaccgaacagagtgatcaaagttgcgtagagagtcacaagaaagccgagggctaggcgacattagtattaagcaagaaagtcttggcgatgaacttctctcacgcttctttatgtattgcctaaatcctttcatggcccgtttgaacttggaccgccgagagtgaagcatgtgtcgaacatgatcatttagttcagcataatcttctctgctccatccttcaacctgccctcctggaagaacggcatacttgggaccaggcaacaccgaggacatgctcgtgaaatggacttgttctaaattcggccgctccttaagcttgtcatcggacagttcattatcgtccgttgcagttcccggttcatcatctgaagaagaatattgtggccgtgtaatcgtatatgtgggcatgcggttgacgaaactacccagattcggcacgaagagagagttttggacattggtgagagtggaaagcgcggaaacctcgggatctaggttcggacaagttagaaatatggttcttggattacacttgatatcaatgcttaccgatcacgtccagcacatcgaccacgtgagatccatactcatcctggcgttgctcctcctgttgcgtgctcagagttggtgcagtccctgtcactgtagctgcacggttccgactaaagcgattcatcgcagcttgactacttcgtctaagccggcccggtcgcactggggcgggagggacctcgccttgctccaggtcaggttggtcacagtcggaccgagcccgtccaggcaatattgccgctggagaagggggtgccggactttggtgtgaggcttcctcggtcagaggcaacatccgcataggggtcgccactcgagagaggccatcgggaggggggaatggccattgtcctggatttggctccgagttactgcgtcgtcggtttgccagccatgattcgtcctcttcattggggggaggggacgggatgggcctcggttcaaaggacgatggtggtcgactccctgattgagacgccggttgattggcgttgtcgagtgaagcgagagatgggaagcgagacaagcgaatactcggtcgtcgcattcgtgagtcgccccgagagcgtaacgagccaaggcccggcctgacggggccagactctgtgggttgccctgtgggttggatctcctgaggatttccattagaggtcctggggtcctcgaccgggtcgataggatccatcttgctgcaacaagattcaggaggttggggacaagatcatacaataaaagtagcccccgagaccaaaagaaaaaatgagataaccaaggatctgagactcccgagtccctcgttagtccccggacgttctggatcttcggggcggttcacgtcccaggctgactcagctcttcccgaatcttgtttttttctttctttccagtgacgagccagtggagttcacaagttcaatatcacgctaaattgacgatctttctttttccgttctggagatcttctttcaaggtcgaaggtcagatatcaattgcgtaagtcctgaattggagccacctatgtaaatggactacggtgatgaagtttatgcctgatattcaaggtgtctagactcttcatgcggcgatggcgataaccggggacccggacgtcatcagaagagaaccatgtagatctatatcgtgcgttacgacatattgtacaactttgtatatgtttttgatggcaattaacagggttaaagttcataacaacttgttccgtaggattcattccatgaccattttagggttattcattatttaatggctgcaaagatggctagagagatgtacgcattaaataacgattttaaacgaccataacaatgagccctgctctatctttaaactatttctctctcaaggcacagtactaacagctttcgttgtctacggagacgtgcacggagtgaaacaagcatgcgataaactcaacggcttcaattttcagaacaaatacttggtcagtacggtacgtgcatatggatcaaatgagtatcggtaattatttgaagatgaccaactttggatgttatatatcatcgtgacactggtggttaccgctacattgtagaagaaaagggcccgtgccattctaaaatatacatcctattccttagtgccaaactcaagatgcataccgaggcatagtttacatgcgatcaaaccagaccgaagttgttcatgaggaatgaccttgagttggccaatgtttctaaaactcgggtagatgaggaattaaccgacagagataggcccaagggctagattgtgtttctagatcggagctggcttgagcagagataattacttgtgagacgactatgatattgtgtaagatcaccgtgtcacccgtgtagcctgccctaatacttgtatccatgaccgaataattctggttgcatatcaaagtaaacaattgtatatccatgtcggccatcttctacaatctataatgtaagatgaacccgagccaagccgtggagaacatgaagtggagataaatgttggaagatcttgaattatttataggacctgtcacatctgcatatcatctagattctgcacatgtgcataacgtgcagagccgaaggatgagatgaataaaatggactaatcgagtggaataatatagaaaggacgaaagccaagagccgattatgattggcgggaaaccctagaaagtccccagaatgacatcaggtcagctgttctgagtcaggctttcaggtaaggcggggctggtgtttagggcctaaaggcgggacctcaggagattctggggctcagcgcctaacaataggggctggttggggggaaataggggtatcgtagggcagggggctaggggggtacctacgtgaacagccccccccagtcatcgaggcaagtacctcgattgcacctgtcgttgtcatttcgagctctcactgggctagtgccacaccgcctctcctttcccatttccatctccttctcccatcctcctctttcctctcttcaagatccagttcatccaaacttcaatcccatcttctcttttcaattggtatctagggcacgaagctaccctgctccttccccccgctccacctcccgtcaagtctctttcagctttaggcaaataaacaacccgactcttttcatcctttaatatctcaaccttcaagatgtctgaagtcgatacacttgctgactccgtggctgcgaccactctgaccgataagcccgaaatcaacggtgctaccccttccactcaggcagctgatgccgcggctgccagtgcagatgagggtcgtcgtctttatatcgggaatctcgcatacgcgacaaccgaggacgagcttaaggagttcttcaagacctacactatgtgagtacttcccaaattagtgttttcgtccgaacaatcaatcccacccggagcaaacattcaatcacgtggcaccatcatttatgggaccatttctaactcctttcgtcttaaagtgagaccacctcgatcccggtgaacccccgcaccaaccgtcccgttggctatgcatttgtggatatcgccaccgcccttgaagctgctgctgctatcgaggccctttctggcaaggagattcttcagcgcaaggtgtccgtgcagcttgcccgcaagcccgacatcgccgagcccaaggaaggtgctgccagtggtggtgagggtgccgaggctcgcaagcgtgctgctggtcgcggccgtgcccgtggccgtgcccgcggtcgtggtggccgtaccggccgtagccgtgctgtatgtgccaaatatctttccttgcttgaatctacgcatatcgacactttgaaatggatgctgacactcccgaaggcccaggaaggccaggaagccaccgaggcccctgccagcgagactcctcttgctgacaccaccaacgataaggatactgcctccaaggctggtgacgcccccgctccaccccccnnnnnnnnnnnnnnnnnnnnnnnnnnnnnnnnnnnnnnnnnnnnnnnnnnnnnnnnnnnnnnnnnnnnnnnnnnnnnnnnnnnnnnnnnnnnnnnnnnnnnnnnnnnnnnnnnnnnnnnnnnnnnnnnnnnnnnnnnnnnnnnnnnnnnnnnnnnnnnnnnnnnnnnnnnnnnnnnnnnnnnnnnnnnnnnnnnnnnnnnnnnnnnnngcggccggcggtcctcccgaggatggcattccttctaagactaaggtcatggttgccaacctgccgtacgacttgaccgaggacaaggtgggttatatctattcctttcgtctgatctccgtctggggttacattgactgacatccttttctccatttagctcaaggagatcttcgccgcctacgagcccgtctctgccaaggtcgccctgcgtcctatcccccgtttcatgatcaagaagttgcaggctcgcaacgagcgccgcaagactcgtggcttcggtttcgtcaaccttgcctccgaggagctccaggccaaggccgtcagcgagatgaacggcaaggacattgatggtcgtgtcatcgccgtgaaggtcgccatcgacagcccgggtaaggaagatgatgatattaacgctgtggctgagactgaggagactgctgctcctgcttctgatgctgcctctgctcctgctgctgctgctgctcctgctcctgctgctgatgctgatgcagctggtgcggctgatgctcccgctcctgctgctgccaaggagaacactgctccttccgtcaccactgaggcttaagtgccgcataaattgtactcgactgaacgaggtacttgttaattggctttaaggttgagaaacagaaggggactcaacggaggatcgtatcgatatgaccatagtgctctgcaaaccacagatcattgtgaatatcttagctactcaacgattgcgggagaaatggggagaaccctggtggggttggattcatgactttatcggacaacatggatcagccgaccatgcgagggagccatcttagctgatgtgctcttcgtccttaacgactttcttttttttttttcttcgccttctgtattgtacctttagcacacatttactaaatgatgacgatctccacctggcgtattcgatttaagagtaattcctgtacacctatactatagacatgcggtctacggagtatacaagtggttgtgcccgatttggagatgacgcgaagtccgatccttgccgatcagaggcaaaacatagaatttgtattctttcaattctttccagttgattttcattctctcgagccagttccattagctttgtgtcttcagtgtctttcagtctccgcacaactccatcgaaacgagaaaaaggggtaaattattcaacatcggtgccgcctcggtcaaccctacaacatcctagcgcacaccattatttagattgcgtccctcaacgtctcaccgtcggcattgtatattcacccactatgtcgcgcatgtgggaagtcgacccggaaacgaggacaaaggtgtgccaggtcaattccacaacgcgccatggtcactgacacaaccatgtgccacagctcctccaaatctccaagacgaacggaaatgacaagtgctgcgattgcggtgccccatcgcctcaatgggtattctttatcccttcctcttgcctattgccctgatattgtcttcgagaagctttatcatccccaacaacccatacacacctcacaaaccacacaccctgctaactctttgcttgtcattggcacatcaactaggcctccccgaagttcggaacattcatctgccttaactgcgccggcacacatcgcgggctaggcgtacacatctcatttgtccgttcgatcacaatggacgccttcaaacactccgagatccaacgcatggagctaggaggcaacgagccctggaagtccttctacgatgaacacccagtcaccgtctccgaaggccgcacattcgaagactccacgattaaggaacgatacgatagcgacgagggcgaggaatggaaggagcgcttatcgtgcaaagccgacggccgcgagtacgtccagggccaggagaagaagaataatgccccctcgcgctcgaacacaacttcgaaattgaccggcacgactgtcgctggtgccggtgctgtcgctggcggccgggctggatcgcctgcggcctcatccatccgctccggtgacagcttgcggggtgtgccaggcaagaaggagcagaacgaggcttactttgcgaagctggggaatgaaaatgctactcgcgtcgatagtctgccgccctcgcagggtgggaagtttactggtttcgggggtggtatgcctgcgcccgccgcgagtgatcggcgcacctcgccctttggcggatttggaggttggggtgttgggggtggaggtggaggtggaggtggtcagccgttcgaagatcttcaaaaagacccgttgggcacgatcactaaaggacttggatggttcacgtctacggttggcaagagcgcaaaacaggttaatgatgcttatctacagcccacggctaaacaggtgtgttgcacgacctcgcttgagagcagttataggtgtctatagcttcttccgatgcaattactgacatgaattacccagctggccgaatccgagttcgcggcccaggcccgcctccatgctgcaacactcggccagggcctgcagacaggcgtccgcggcgctgccgaccagttcaataagtttgtcgaaggagaggatggacgcggtgacggacgccggaatcgcgtggagcctgagcgccgagacttctgggacgacttcgcctcaatgggcgaccaagagacacctagccatcgccgtagcgcatcacaacggtctcaacggtctcagcggtccgacgttgttggtaccgctgccatgcgcaagagccccactgcctcctcgttgggtcactctacgcctggtttgtctggtgaagccggagagggtaagaatactacggcttcggcgacgggtaaaggaaaggatgaatgggatgacaactggtagcatataagcgctctattttactgttctctgtttgtttgtgggccgttgttatggtgccatgactttatgtctctatctgcactacacatatatcttggtagaatctccctctttcgcaaagggaagatcagatgcatagtccataatacttcatattagcttgacatggtgtcaatcggggaggtgtgagaaaaagggtggcagaaagtagaataatattggtacagtgatgagatactatgagattgtgataatatacaagaaagtttctactgaatcagcctctcagttccgcaagcacggccttctgtctctgaccagacatcttctcaaaccggtcaacactcatgacaaaagtaccgcggccagcagtcaagctccgcaaatgcttgagatacccaaccatctccttgagcggcacctttgcgacaattgtgcgcgggcgagtcgcagcagcagggatctccacgccaatagaagccgtctcgaacggatcaggcggcgcgtaaacacggctgtggtcaatgggcggcaatgcctcttcttccagtgcagacgcagaagtcgcgtccgtgcctgatagcggtacctcctcgtcaagtgagatgatatgtccacctcgtgaggaggaaatgtcgtgcacgacggagccgagactcgcctcgtcaatgctgataatcacatccatcaccggctccatcattactgtccccgcgccgagctgtacatccttcaacgccgcagcggtggcttggcgtgcggcggatgagagggccgaggtggttgtttcgttgccgaagaggtcggcggccgggttgatagttagtgtgacgcgggtgttatgcattgggaaggtgaattgaggcccccgggcgagcgccgccacggctccgttttgcagcgctgtgcggaacgcgacgaggtccatgcctggtgggagcaatgggctagtttcttcttcgccacgcgatgactggtcaatttggagaccgggggcgcggatgatgatctggttgccgtcgtaggtttcggcgaggagcgtggcttggtctagctcttgggactcgaggtcttcgtccagtggctccacgactgctgtgcagcctgctttacccttccgtccggcgatctccttgtcgaagatcttggttattgggctggaggtaccaagtacggattcgcgatagccgatctcgatgcggcccattgtggccttggctttgagatcgttgattagccggtcacgggcaatttcgagatgcaactcccccatgccgcttagaagcgtctggcctgactcttcgtctatgttgacgtggagactggggtcttcacggaggaggagtgcgagcgattctttcatgcgcttctcctcgcttaggctgtgcggctcaacgctggtaaagaataccggtggtggaacagcaataggtcggagttggagactggtaagcggctccgggggagtagctttgttccctgcgtaggacacgagggtatcgcctgtccgggtgtgtttgagcccgactacgactccgatgtgtccggcagcgatcgagtccacttccacggcatcgttggcgtacatcttcagcagacgtggggcacgctcggagagctgcaggtttgtgttgaatagaaggctgttgcgatccaacgagccagaatatactcgtacgtagactagaactccgcgctttgcgtcgttgaccactttgaatgccagtgcacagctttgaagcttgctaatcgcatcttttgagctggtctgcaaggccaagttctttttcttcggttgtttccctttcggttgcgcggatgccttctcgctctgctccacaattaagtctccggacagcaggtcccgaagacctcccttgacaccgccaatactcacttctgggtcgggagcttcgggcggacttgggagaagattcacgatggaatctagtaatggctgaactcccatgttccggaaactggcacctgcgaatagagggacaatttgactccgctggtccaacacgcaccggcgcaagctctcaatgatatcagctggcgagacggcgagatgatcttcttcacactcaaagaatttctcaacaatgtcttcatcatgctcactgagcagctcgaccaatgcaattcgtgcgcgccgcagctctgcggccagagccggctcttctgcctctaattgctgaaggtcggccacttttacattgcggccatcctcgccttccttccatcgtagtccttggagatggattgcatctgctacccctataaaggggccattgcctccttggaaccacggtatctggcagaccgctggatagacacccaagcgagtgctgacttctcgcaccgtcctaccaaatgcggccccgtcgcgatctagcttattcacaaaaatgagtcgaggaatgcgataggtgcttgcctgattccagaccttctccgtctgcgcttcgacaccggcaacaccatccaatatgcagacggcgccgtcgaggatgcgcagagatcgcatgacttcaaatgtaaagtctgcgtggccaggggtatcaatcaaattgatagtatgcgggtaagtagaccgcggggtttgctcattctgcgccccagcttgggggcctgacgctccatttacctctccgggaggccaatggaaggtaatagcggccgactggatagtgataccgcgtgcacgctcggcgggaaggaaatcagtcactgttgagccttcatccacatcgccaatgcgccgtgtaaagccactgtagaataacatgcgttcggtagtggtagtcttgcctgcatcgatatgggcgataatgccgatgttccgggtccggtccagagtctcatcctggcatgcagatgtcgtggaaaagcgttgaagctgtgtgtaatttgaccgaagacccttgagggaggaatatgcatttttccacgtcccattgctcggtgtcttatatagattggagctcatacagcgcaccccggagggaaagcgcaacaacggagcgacgaccattccaaggggaaacgctcatgtaataagggacagaagatgaaaaattaggttggaattggcattgggctgtatgatattgttattgatacaatagaagatcaagctctagagcgaagaaatcggaccacaaagcggactggggatcgccaggcttggcgcacgcattcctcaatgcgtgacttgactccgacactacctacctctcctcaactactcagatccttttgctcatacccttgctgtttatttgctgtctttgttatgccaattcaacgggtctcatctattctctccgtttgaagctgcacgaggtaggtctttgagtgcctggaagctgaccattactgtgggggtccgatcttcagccgtttaatactgacgcctgccatgaccagccactcccccttgtcagcgattatactccttacgccgaccttcaactaagatggactactctaccatctctaccgacccggatcatcctgtcggtacctcgccctggggatcaccgcatgttgagcgaggcgccttccccacttccagcaatgacatcccgtcgtcccctttacccggccaggagcaatcggcggacgttggtagtagtcacaatggagaaccccaatctccagacctctctgcgcagctgcagagcgcgcaattaggagacccggactatcccgaggagccattcagcgcgcaccagccttcaaacagccagcaacaactatctcctactctcgcacaatttcagaccggagcacgagacacacggccccccgctcccgcctatagaatccaaggaaaggtcactggtctggagaggacggggaagaaagacccaatcctgcgtttcgacatccacgtaggtctgcccctgggagtatttgcgcctgtgccatggctaattcccgatttttctttgagatcagaccaatattcccaaattccgcacgacccagtaccgtgatgtgcgtcggacccattccgaatttgtcaagctcgcagaccatctaatttccgccaacccggaagctctggtccctgctgtgccatcgccagtgacgccggccggcgccggcaccgaggaggatgagattcgcatcaaatcggcgatgcagagatggctcaatgttgtgctaagcaatgaaattctcattcaagacgacgaggttgtgcttttcgtggaaagcgacttcggctatagccccgtactgcggatgaagcagccggcaacgggcgtgcgacgaaagatgttgaagcagtttgcgccgcctccagatgacacacccgagttgcaagctgctcgcccaattgcgaagatgttttacttggcatcaatggatacgagccacaaggtcgaccgagttgtcaaggcccgtcgtggtacgttatcggagttttaaactgttttggtcgcatattttgttccgattaaaactgacaattttttagggcttggattggctgaagccgatttcggcgtgaagctcggtcagatgagcgtacaggagactcatcccggcttgggcgccgcttaccgtaaacttggcaagattgttcagacagttggcgactaccacgctgttcaggccaccgcggaggctaccactctcggcgaaccgttgagttaccactcttcagacgcctttattgtgaaggaaaccctcaccaaccgccatattcttctgcgtgatctactccaggcccaacaaagtgcacggagcaaacgtgccgcagcagaccgcttgaaggttagctcatcggtgcgtccggacaaggtagatgaagcgatcaacgctcttgaggaggcccaaaaccatgaagattacttgaccaagcggacccagcgtgtcacgtcaaaccttctccaggagaagcgccgctggtttgaccgcaccacccaggatcttttatccagcctacgtgagtacactctccgccagatcgaagctgagcgccgtactctggccactttggagagtgtccgacccgacattcgtgccattgacgcttccggtggtcttagccggctgggtcgcgaatcccacccagcgatgcgccggccaaacatggcttcgagccagggccctaagggtgattcgtggagcggtgttcctcgccgcaatgacaacattggacgcagcatgagtggcagctttactgccccctcgctccctgacgatgatgatgaggagagctctaataaaggacgcaaccgagcttccagtcaggttgggtcgattgcggaggaagacgatgaccgtcttgatgcgcgaaatgcagccagcagattggccaccagcacgttctgatcgtattttgggacgcaacgagtctgtacatgtagccccggcacgaactagtgattcccctttgttcctcttataacttttcgtgtcctcctgttatgttatctcctatgcacaatcagtatccttttcaaaattgattatagttgcaattgttctatatgactttctaaatgcatggtgattaggttccctgcaccaacatgaggcctctcgaatgatatcaagtcatcaatactacaacttctcatattccccccacttatcccacttcttcgtcccatccccctcaggtaattcaaaccaagacgccttctcactaagaaagatatgatggcttggcagcgggatctttgtcttctcctcgtcgagggtccccgcagcgattccgatactcttcggatcacgatgcaggagcatactgagagtcgaaccgcatttgggacagaaggtacgcgtagcggcctgggttgcctgtcgctctgtgggactgacatgccatcggatatcgtcagtcgcaaagaatgcccaggtttgatagggtgcgccggcttgtttgcggcaggttgtgcagtggcagtttaccaggcaggttgggggagtggaggccgtgtagccgatgtaattacaagcgcagctgccggaagccattctcggtacttggatgttggaaattgcaggattgcgaaggtaatcgcgattctgacatcatgtggggtatcgaagctctacatataccaaatgggcatggacgtgtccctctataattagccactttgtacgaattacagagttgatttccaatctgtacaacatcccctcatcgtcccccacttggtgctcgggccatatttgatttccaagcgtctcaacttccgatcatacttgcttcacttatttctatctgcgaaatctttttcttcttcattttccaattccaccatgtctcccaaggttttcgtgtaagtcattccggtgtaaaccgagcactcaatctaacgagtcctcacaggactggcgcaactggctacatcggcggcgacggtctgtttgttattgctaacgcccatcctgattggcaattctcagccctagtccgtagcgaggaaaagtccaaacaggtcaccagccaacacccgcagattcggactgtgatcggtgatctagactcgtccgagctgatcgaagaggaagtcaagaacgcagacattgtcttccgtacgtttattcaaacttatatatcaggatatcatgtcactaataacatatacacagacttcgctaattgcgatcatgttgccgcagctaaggccattgccaagggcgctcagcaccataccgccgagcgtccattgtggctgattcacacctctggcactggtatattgacaatcgaggaccagcgcgctggcacatacggcattgagcggcctaagcagtacaacgactgggagggcgtcagtgagctagtcaacctcccatcagacgccttccaccgtaacgtggatgagatcatcctcggggttggtgagcagaccccggccagtgtgaaggtcgcagtcgtatgcccacctaccatctacggtcttggccgtggccctggtaacacgaagagtatccaagcctatctgctcggcgctgcggtgctgaagcgcaagcggggcttcctggttggaaaaggcgagaacgtctggcaccaggtccatgtccatgatctgagcaatgtctacctggctctgggcgaggcagcctcggtgggaggtggcaaggctacctggaataacgagggctactacctcgctgagaatggatcctttgtatggggtgatatcgagcgtgcagttgcacaggctgcttttgataagaagcttattccttctcctgatgttgagtctctcgatggcgctcagacgactgaggtactttctgttggtacctatgcctggggctctaactcccgtggcaactcaatccgtgcacacaagctctttggctggacacctcagaagcctaagctgattgatctcgttcctgagattgttgaggtagaggctaaggctcttggcttgctgtgaactcggtcttatgttaattcgtgaaaacactatgaaattgacgtattaaagagcacaatgtttgagacctttgaattaggatatgcaaattgcaatgtagtccagtgttgttttgatgtgttattcctttcttcgatgtttttgaaaggtgtggggaacattttaacactaggccacaacaaaaacctcgcttcctgtttaggccatattcgcagttcgacaaaaagaagaaaaagaggcaaaatagaatcgtcagcactaggactcgaacctaggttcacgaatgaactacttgacggaaggatcataaaagaagccgttcgaaagtagcgccttaaccactcggccatactgacttgataagaaaattggcaatcttgtgcctactagcggctgcacttgacctcttagtagggttagacgcctaagacctcctgccaagaattcaggtgtttaatgtcagtaacatctgctggtgaagtatccgctagacttaagagaaacccgacatagttatgcagaccacgtgcgggccttattcaatataaacaatgttacaatatttacccatatggcaatatgaacaatgacctattcacctgttcagctaattattcactctcatttaacggcttaatcaattgtagcttctattgttcctttaattgaagagctaggtcattattgaagagcttgaatggtaatcaataataaatcaataaggcacacatgaactcttggcgggggcctcaggcgtctagccctctggaggaagctttgaccatcagcatcttctgtcttcaccttacacgcctttggcttctgcgaccaccttgtactcaacggaatatctttgctggtacgcttgatatgcgcattatttcccttctttacttatcccccttcattcgccgcgggcgcttacattcattcttccgggctcctacagaaacgactgcatgagttgcaacctttcagcgtccagttccaccgtcgtaacccctcgtgtctaacacggctacctatcatggcgcctgggtacggacatggtggcaagcggaaacgcatcgatcgctcatggtccggcgagtcagggagcaatgacctgcgaccttcaccccatcgccctgggactctcaatatggcacatcaccctaccaatcctggacatcaatcccccactcctcgagagcagaatgacacacgcgacagatctcgtcgacaatcgcaccgcaaccgggctggttcccgccgcggatcccacgatggtcagaatttttcgaattcgcagcacagagaaccgaacgcgatgtctcctcccgcaataaatcagcccagggaacttgccgaccccgtgccgtataatggcgattcggccgcgtcaagacctaccccttctcccgcgccgaatactcctgctccgcagccgcaattcaacccgccgtctcgagctagctcagagactgtcaccccccacccctctctcccacccccgccttatgattacgaatatgtgaccgatagcgctgttgaggaatgggcatcagcgggcaaacaaaaggtagtcggagaagggactgcggctcgcctggaacaggatctggctcggcttgcatctgtctaccaggaacttattcactccgcgatctacggtcgactatcaccatcgcatgcgggaaatgctgtcaaaaatatcatcggtgaagaatctgtgtcccaggatgtggatatggatagtgggaagcctttgaccctaggaatcgatccgcgctccttgttcctcgatacgctttccatcgtgactgacgctgacccctcgaacgcggccctcaaaccacttgtatttgcgacaggtattgatccttctttaatgcgccttcagcttgaaactccgttgttgcagtccctagggctggttcgcgaaacctttgcgcgaatgggaattcgaaagcagaccaatctgctctaccgacagtccaactacaatcttcttcgggaagaatctgagggatactcgaaacttatcaccgagctattcaccacaagcaacaatgagccgccgtcgagtgaagtggtcatggatacatttgaaagagtcaaggctatgattggcgcatttgacatggatgtcggccgtgtgctagacgtcacgctggatgtgtttgctgcggttcttgtcaagcaataccgtttcttcgtgaagcttctgagggttagctcctggtggccgaaggaagaagccgtccacagactagagcaaggctatcgtcactccggtattccgaattgggcacttccagggtcaactggatggatcacaaccgacgaggaacgatccgctactatgcgcgcgaatgaggagcgtgacagccaattctgggatcgagtgagggaaatcggacttcaagccttcttcgagatcggccgcaaaccggtcccaggggtggaagtgcaacgcaatctttcggaaattaacggttcatcatttgaagaagatgccacacgatcatggctcgaagagactggcactatacccccgaagggcaaccgggttgcagcacagctgcttggtttcaaattgcgattctattcttcatccgctcgaaccaaagacgacgttcttcccgacaacctcatttaccttgccgccttgctcatcaaagttggctttatctctctgcgtgacctttatgctcacctctggcggtctgacgacaccatggagattctgaagaccgaaaaaatggcagaaaaagccgaaagagtgaaggctagccgaccaggtggcggaatcaacgctttgatgatggccggtgctttgtcggacgacacaatccctccttcccgcttgcgcgacgagccgcgagtggcgacccctagtaaagaccaagaatccgacaagggcaccgccaaaatggaaaacgagttgccagacccatcagaccagaaagtgctgctcctcaagagtctcctcgccattggcgccattcccgaatcccttttcatcatcagcaagttcccttggttgatggaggcttatcctgagctgcccgagttcatccaccgcatactccatcactctttgaagaaggtttacatccagttccgaccatcggtatctacaggtgactttcccggagctcaatacacggtgacttctgatcagaacaatgcgaagggccagatcggactcacgcccccaccttcgagacgagtactgcgatgggctcaactagataaagaagacaccaacgatggcaccgattaccgattctactgggatgattgggccgacaacatccccatttgtcaatctgtcgacgatgtttttgctctttgctcatctttcctcaacctttctggtcacaagattggacaagatgcgagccttctggcgaagcttgtacgcattggaaagggaagcttgatccaagacggatccgaagcgaacagaacacgttggcgcgatctttgcaagcgtctcctcctacccgctgtcagtcttacaaaagcaaatcctggtgtggtcaatgaagtttttgatctcatcagcttcttcccccgagatgtgcgatacaacatgtacgcagaatggtactcaggacagacgtcccggctgccagacatcaaggaggccttcgaccaggccagggcagagaccaaggacaccctcaagcgacttagcaagacaaatatccgacccatggcccgcgcattggccaagattgcttacgccaatcccggaattgtcattaatgtcgccatgagtcagattgagtcgtatgaaaatcttatcgaagttgtggttgaatgcgcacgctactttacttaccttggctatgacattctatcttggtccctcattaattcgcttggccagaaaggacgaagtcgggtccaggaaggtggactattgactagtcgatggttgaacgctctctccacattcgctggtcgaacttacaaacggtactcggtcatggaccctactccggtcctccagtatgtggtggagcaacttcggcacaacaactccaccgatctcattgtgctggagcaattgatcagctcaatggctggcatcatttcagacaacgacttcaatgatgctcaaattcaggccatggccggtggtgatgttctccaatcccagactatcttgcaactgctggataaacgtcatgagtcaaagaccacctccaaacggttgctcaagtcgttgacccacaccagaatcgccggtcaactgttggtcgccattgcccaagaacgactgacttgtgtgtacaatgaaacctcctcggagcttaaattgctcggcaatatctttgacgaaatccaccgaattctcactcaatacctcgacttacttcgcagcaatctctcggttgatgaatttgattcctttgttccggacttttcttctctcgtcacggagtttggaattcagcccgaaattgccttctggattcggcggcccagcatcgctcggaaaatcaacgacattgaagaatcaaaacaagagaaagaacgttcagtctctgtatcgaagtcgaacggcgaccacaagatggatactaccgaggacgaagaaaaacccacgaagtccgagactccggcagacagtgccatggatgtcgataaggacgaaactactccgaccgaaggacccgatgctatccttgcttccgcggtcaatgccgagccattggcagccaatcctgtcatgcaagatttgattgacgatgtcaagtctgctcttcctgctgagacatgggggaccatcggagcacacttctatgcaacattctggcagcttgccctctatgatgttcatattccgcagaaatcctacgaggatgaaattgacagactcaagcggcgagttgtctctatcaacagtgaccgatctgatcttagcgtggcgggcacggcacgaaaggagcacttgaagcgccagattactcagctacaggagcgtattctagatgagaataagaatcacctgaaggcgtatggacatacacgctctcggttgcagaaagagaaagacaagtggttcgccggcatgcgcctcaagcatgactctctcaatgttgccctgttggagcaatgcttcattcctaggcttctattgtcccctcttgatgcattcttctccttcaagatgttaaaattcctgcacagctctgggacccctaatttccggaccgttggtctccttgaccagcttttccgcgagcagagactcactgctctcattttcttgtgcacatccaaagaagcggacaatcttggtcgtttcttgaacgagatcttgcgtgatcttactagatggcatgccgataaggcagtttacgagaaagaggcattcggtgccaagagagaccttcctggcttcgcgaaaaacgtcgatcccgaaggtgttccagtgatgtttttggaattcgaagacttccggcgtctgttgtacaaatggcaccgcttgttctccaacgcgctgaagagctgtctcagcagtggtgaatacatgcatattcgaaatgccatcagtgtgctcaaggctgttgtgaagcatttccccgctgtaaactggattggtcggaacatcctgaactgtgtcgaccacctgagcaagaatgacgagcgagacgatgtgaagattcccgctgcttctctgatcggtgacctcaaccggcgcgagaagaagtggatgctgccacaggctttctattttgcggcagctcagcctggttctcagccacctggcgacgcatctggaacgcccgggactcctcaatctgctacaacagcgttgaatgcctcagccccagagttcaaccctactggatcctcaatgtaagtgacagccttgaccatttcgacatgctcacaatgactaatctttccatctttagctccgataatattgccaagcaggaacagtctggcaagactgaagtcgaggatggtgaaattgaggatgcgaaaatgaccgatgtcggtacaggcaagggcggcgaagccaggcggaccggaaccccctctcaggccggatctaccacgccgtccatgctcactggggaagaggctacatccggtgaacagccccctgtgcgatctcgaccaaattctcgtgccccgacttcatcccgtcagcctgatatccccaaaagacccgatattcgccaacaagttcatcctcccgttcgtcccccgccacgacacagcgatggaagactgcctccccgccccgagggattggatgaccgacgagagagacatcctgactttggaccccgcggtcgtcatggcccagatcataaccgctcctttgatggttctctaggcgatgtgcgaggacgtctcaatgagcatctcaatgaacgtgatcgtgaattccccatgagacctgcggctgatgatcttatgcggggaccacctcgtgattctcgttctactcgcgagaatggttggcctatggataggcctggtcgcatgcgtgggcccggacccaatgattcgttccatggacgtgatccctctgtgcgaggagagctgatgcctgaccacatggaccgcccagtcgatattcctcgacgtggagattcgtctagaccagagaaagacgatcgcaggccctatccgccacgccctctatcgccccctagacctgttgacctgccaaaccgccccgaccgattccccccacccgatgatcgcagacctgccgggtttaccccgtcctcccgtattgatgatctccccaggggccctcgcacggatcgacaacctgatccgagggacgctgcaccaggtcctgatatgactcatggtcggcttcggcagccggaacctccgtctgagattcctgccggcccccgaagacgcggtggacgcaatatgtctggacaggcacctccaatgctcagttcaagcaatgctaccttacctgctccggaacgccagacacctacgggccctgcccgacaaagtgggcgtggggcacccgagcaacccgctcctccaagccaaccagcgggctcaagcactgccccgggtattcacccagatcgccttagaaatcttgtcaatgaacctgcagcccccgctgctgctccatcgggtcctcgcggattaggcccacaacaaccacctcggggaccctctgctcagtctgggcagtctgggcagtccgggcagtctggaccgcctggaccgcctggacaaggcttcggtggggagcgtggccgtggtgataaacgtttcgcaggcctcaacaatgtgctccagcagtctggtggtggcagtggtgaccggggtgggaacactcctgttcgtggaagaggcgccaatcgcccaccaagcaccatggaggcaccatctcctcagcctgcgaaccgcccacccatgggtcctgcgggacctcaagaagatcaatcccgtaaccgatccaacggtggccgaggtggcgacctgcttgatgatgccgttcccgaggcgggtcgctctggatcaactggaaatcgcacccgtgaaacagagcctactcgcgagaaagaacccgagcgccgtgagggcagcagcaatggtcgcaatcgacgcgatggccgtcgaaatgaccgtgaacgcagccgtcgaagcgatgtaggaggtggcggaagccgcgacgacaagggcactggcgagccccgtgagactctgcgccgagtccagagctcacgcgaagagctgcgacgccgagaccgacgtgaccgcccagatggaccgccaggaataactggaccaacacctagcagtgagacccatgatgaaggccgtgtgcgacccacgtcctctatggaggcaccgccaccaccccctcctcctccacctccgcccatgccggaaggaaacgagcgtcgtttcaatactggcgaacggggtagccggtccgacaatcgggatcgtgagcgcgagcgccgtggcgaccgacgtgaccgggatcaccagcgtgagggtggtagctctgggggctctgggcaccgtaagcgtggtcgacagggccctgacgatggccctgacggtggacgcggcatgagaatgggaaatgataacaagcgtcctcgccgaggagcgtgatcctcaccatttaccatgataccccattgaaaggaatggaatttgcttttttttatgttcttttgctacaaacctcaagttcctctacactggactttctactgtttcctatcttgactttgcattttgcgtggtgtttggggaccaaccacttcacttcttcacatgtactttttcttcttcttctaaatgaacgtaactgaaatgcaatatccaaagatcttccatgattaataatttctttccatgtccgaggttctccgtactccgtctctcgtctctccaggctcagcggtccaatatccgacgtgccccgccctaccgtcagtcgggtaaacttcggttcgcaactacctccgtgcccctttgagagagttctcttgagagagcgagtggatgatcagccctaacatcttggaatatcatttgttcaagtcctggtatcatatatgtagccattgtcattggatacgattccacagcttccccgcctacacgggctggtttcacaatccgacgcttcatacattgaaggcctgaactctttagttttgcgtataaaagattgattctgttcttattcttcttttttctttttggacaacgagtgtatcacttctctgtcttcggagattaacaacctcgagcttattggacgcttcattctcccttgcagttgaacaagagcacaagcaattaatatacccccaaaagagaaaagagagctgctacatcatgcctcgaatcgacgttgagaaagccatcgaggagctcaccctcggcgagaaggtggccctcacagccggtaaacctgcttcctattgccaaagatccaattcaaactaacctcaccttaggccgtgacttctggcacacacatcctatcccacgcctaaacatcccctcgctacgcatgtccgacggaccaaatggcgtccgaggcacccgcttcttcaacggcatcccagccgcctgctttccgtgcgccaccgcgctcggcgcaacctgggataccgagctcctctcagaagtcggcgcactaatgggcgaagaagcgatcgcaaaaggcgcgcacatcgtgctaggcccgacgatcaacacccaccgctcgccgctgggtgggcgcggcttcgagtctttctcggaggatggtgtgctctccggcacgctcgctggccacttctgcaaggcgatgcaggagaagggtgttgcggctacgcttaagcactttgtctgcaatgaccaggagcatgagcgcatggctgttagcagtattgttactaaccgggcgctgcgggagatttatctcatgccgtttcagctggcgatgcgcatttgtcgcgcgcagtgtgttatgacgtcttataataaggttaatgggattcatgttagtgaggataaggctcttattgatgatatcttgcgcaaggagtgggggtgggagggtcttgttatgagtgactggtgagttacgatgggttcattctgttatttcggatgctcacgtttgatttttaattgtaggtttggtacatacagtacctcggatgctatcatcgccggtctggatatcgagatgcccggtaagacccgctggcgtggtgatgctcttgcgcacgccctctctgcaaacaaagtggcccaataccagctcgatgaacgagtgcgcaatatcctcaacctggtgaactgggttgaacccctgggaatccccgagggagcacctgagaaggctctcaaccggccacaagaccaggctctgttgcgccgcgctgctgccgagtctgtcgtgcttatgaagaatgagggtgatattcttccccttaagaaagatgggtctctgctggtcattggacccaacgctaaaattgctgcgtactgtggtggtggctcagcctctttggctccgtactacactgtcacgccgttcgctggcgtctctgccaagtccaagggagaggtcaagtacagccagggcgtgtactcccacaaggacctgccgcttctgggtccactgctgaagacggcagacggcaagcccggcttcacattcaaggtctacaatgaacaccccgactctggagaagaccgagaggccgtggacgagctgcatctactcgaatcctccggcttcctaatggactacgtcaaccctcggatcaagtcgatgacctactacgtcgacatggagggaacattcacgcccgaagagagcggagtctacgacttcggcgtgacagtcgtcggcaccggccaactcctcatcgacggcgaattagtcgtcgacaacaccaagaaccaaaagcaaggctccgccttcttcggcacagccacgatcgaagaaatcggcaccaaagagctcaaagccggccaaacatacaacatcctcttccaattcggcagcgcgccaacctccgacctagacacgcacggaatcgtcgccttcggcccaggcggcttccgcttcggcgccagccgccaagtaagccaagaagaactaatcgccaacgccgtcgagcaagccaaaaccgccgatgaagtcgtcatcttcgccggcctcacccaagaatgggagaccgaaggccacgaccgcgaacacatggacctacccccaggcagcgacgagctgatcagccgcgtgctagcggtgcacccggacaccgtcgtcgtgatccagtccggcacgccggtcaccatgccctgggaacacaataccaaagccctcgtgcaggcctggttcggcggcaacgagtgcggaaacggcatcgcggacgtcctctacggcgacgtgaacccctccgccaagctgccgctcacgttcccgcgccttctacgcgataacccctcgtacctgaacttccggtctgagcgcggccgcgtcctctacggcgaggacatctacgtcgggtaccggttctacgagaagagcgatgtggtgccgggcttcgcgttcggacatggtctttcgtacacgagtttcgcgcgcgaggatctgcatatcgacactgttcctgaacagagtaagtatgcggagtctggggaaccggtgactgcgtccgtgacggtctctaatacgggtgaggtggccggcgccgagatcgtgcagctctggatcgtgccgccggagacgggtgttggtcgtccggtgcgcgagcttaaggctttccagaaggttttcttgcggcctggtgagaggaagacggtgcagttggttgttgagaagaagttggctacgagctggtgggatgaggagcgggagcagtggatttcggagaaggggacgtatcaggttcttattacggggactggcgctgaggaactgcgtggtgagtttgaagttgggaagacgaggttctggctgggtctgtagggctgtggtatttttgtttgtgtttgtcgttataagaccatgtctcacgagtgatgttatttttaatctgtggatgggctaggttggcttggcatatggtcatacgagattttaatccacatgtttcggtattttgaattggattttctattttattgtggacttcagaaaaagtgaagcagacctagtgtttaagtagaaagtgggtggtgcaggctagagagcgatgcaatggttgggttgaaatgaacataactgacatgaagctgcgaaataaagtaacaaaatacatgaacatccccagaaaccagcaatagatatgataaatggtacaagaacaagaaaagacaagggtatctacatagaacagaatagacacctaatatcaaaagccacgaatacgcctcagggcaaaggaatcaaaaaaaacacctcaaatccctgcaatgcatattgacaccacaaacctcatgacctgctgccatcaataaactcattcccattgtcattatccttcttcctccctagcccagccaacttcctcagcaagagcgaagccttgttccgccggttgtttttcggagaaccgggcatagcaacagagtaaatacgctcctggtacatatcatctgccaagcaagaagacgagtaagacatgccacggttgggatcggcaaacggtggatataagtatccgccaggggaatcttcctcattcgtcgaagcactgcccaatctcgagatacctgtttcgggtctcgacaatgtctctcttccagagcctagtagcgaatccggtgtgactttgccgtggacattcaggtcctgttcctcccaataatccttcggcggccattcacgggagcgtaatgaccctgttgttcggttgcaggaactgtagaagcgcgccattggctttgcctgtttggcttcggttggcgcattttcgtcgatgagacaggggatgtctccgctcacgtgaagccaggttcggcctgtccagccgagaggtgcttcgtgtggggagatggccggggagaatgtctcggggatcgcatttgtgtcggtggcaatctcgtgtggatgtgtcttgagctcggactcggtgacttcgaatcttttgtcggtgtcattgagcgagctgactgggctgtggagtgttgtgggcttggatgtccatgtccactcgctgttcatttggagaggactgtagaatggaatcaagcttggagagcaagctcgccccctttccttatcttcgattgttacttctaggctctggccccgggagcgggtccctggtgatgggctatgtggcggtgaggcagagggttgtttgttatagaaccgtgctgaaatgttggtgcccgacacgctgttgcccgacggtctccttttttgactgggcgaattgatcataccaacgccggaatcatgtctcttggtgctgtccgcttggagattgatcgccgacagaagaacgacatgctgttttagagatgaaggagctgcgtcgacactgggctggggattttgtccgactgtcacggcgctccgataagacaatccagctggcattccacggtcaatgctgtgggatagcatagcgcatgcatgcttgatatcatcttcgaggtcttcttcgatctcttggcggtcgataaacggtgatgcaggacggaagtagcccggctcatctgtgaaactgtagcccccggagggaccagggtccctgtgccatgtgggctcggcgtgggtgggagactcggggtttgttgctgaccggggacgactgctgggtgggctgacttcaatgggcgagaccagtgttggttccagagcccgcgcggagttgcttctggtgaaggtcagacggtggcgtatttgagatgcttttgctgatagcttgcgttccatctcgtaacggtttgtctttgtttgtgtctgatggtcaagcaaacaatgaaaacgaaagagagatagaggaaagtgcgccgacaatcagtgaaaatggccactgattccagggcagtccactgcagcccaaacgactggctcagatcagatccaggcaatttccaaactatgtgaggtcgtaagagggaaaattcaagaaccgttgtcggcacaactgtctggtatgcggggggaggggaatgcagagcaggaacatagtagaagagagaccctgggaatacgagataataagaaagaaaagggaaagatagtgatcttactagtagttctgcacagaactatcgtccacttagataacactcgatatcccctttcgggcctcgttcctgatttctacacaataaaattggaaaatctaagacattcctatccaaagctatctagttcacccggctaaaccagttagataggttaataacgcccatatcgaaaagggtctaagcgcccagtacacatgtagttagagcagcgtgctagtgtgactcaaatcgaggactttttgcgccagtgacatctagacgagtcttcgcagcagttaattacttgaaccacggtttatcagaaacatggcctatagaccaggtgtatattaggtacaacatagcctgcgtacctgaatccaaccgtaattaatagcattaacagcagaataacaaaagagcagagcagaataccctgggccctgaaaagccccgggccgccacctaatcttgtttctgaccattcagctcgggccaagttatcttcgccctggagctacggagttgcggatctacgtacttttgtccaggtcatcttctttgtcttcttttctgatttatttttctaaataatgcgtgcatgtagagataaccaatggctatcaataccgaaaacggacccatcactccccgaggtatcctcccgggggaaattgacccggtgggtcggatggagagcagttggatgcttctttgacagtcttctcggacaaggacaattaccaagtgagagacgggagaggcagttggatgctcatctccctaactggcggaatggaaaaaagaacggcaaccctacttcccctgcgccacgacatctatccggtcgcggacccctgcacgggattctggacccagttagagcatgggattggctgcagaaatcactgcgcctgacaatactttttttttttttcgccgctttaccaagcggtgatatcctccacctcggcctcgccgaaggtgctgctcttggtcagcttagtgacactggccacagcggcaccatcgcctgacttggccatgatatcgggcaggacttcgtggaagaattcgacgatgtggcggttgacttgctcaaattgaagcaggaacgcgtcgtggccctcggggctatcgatgcgacggaggcgagaattggggatgccagctgcaacctcttcttgttccgcgaaggtgaacagaccatccgactcgataccgataacaagagctggctgctctacgcgtccgagcgcctcagctacagtatcctcagtgtcggcgctggaattgccgcgccggcgggacacgtcatgcgtgtcgagcttgcgggtcatggcgatgtagcagttggcatcgaatcgcttgacgaatttgtcaccctggtaacgaaggtatgactgtgcagagaagtaggtcggaggacgaggacggccggatgcagtcagcttgggcttttcgtcgacctcaggggcgaatgttttggtgccagagaattgcgggtccatgaactggacatcggccttgtttgcaggagccggtgagccttgtctgctctccgaacgtgaagttgtcccgccacggtgtccgtcgttgtggatggcccagtgctcgttcgggggagtggggagcctctcggtgccgttgatgttccgcggcttggttggatccggtacattgcgaccgaaccgagactcgaatgaattgcggctacggtaagtgaggagtgctgacatgcgagcggcaccgaggccggtggctggcggatcgttgaacgcatagtagccatcgtcatacttcgggtcactgtagatgctctgtcgctgtgcctcgccccaactaatgcaccacgcggaatgacgcgccgaagtcgcaatgggcacaatagctcgcacatagtctttgccgaaaaatgcgtattccaaggtgagcattccacccatggatcctccaaccaccgcagcaatctgcttaacaccgaggtcgtccagcacgagtttgtggatgttgacatcgtcacggacagtcgttaaggggaactcgggtccatagtagccattttcaggcttaccatccttgtaggtcacagcacttgcactcccgtacgggctgcccagactgttaaggcagatcacgaagaaccgggagacatcgaatgcttggccaggaccaccaagaagaggaccccaccagtcagcgacatcggcactgccactaagagcgtgacagatcaccagcacattggcgccattaggagcgagtgttccgcgagtggtgtatgcgaccgggacattatgaagggtaacaccggattcaagtttgaaggacgggatgatcgcaatggattgatcctcgatcaactgggcataagggttctcaggttgcgaatcgactctctctacgggatttagtagcggttcattgggaagaattgggagggatagagtggaggatagactgacggtattgcgcagtagaagcactgctagtatcagccattgtgaaagacaacaatttgcaaaatgaagaaaaacacgaattggaaaatgagaacaggctgtacttgtaacaaaatcgagtgagtcaaaacccccgcgccttggaataacttggcttccggtcccgctggcagaaaataaagcggtatttagtcacgtgcgccacatcacgtgccactagggctcgctccacacttgaccttatttttcatctgtgcgaattctcttcctccgtagccaaccatccaacaaaccttcttacgagccaacccctcaaaacattcaaaatggtcaagactaagaagtccggtgacaccctctcctcgcgcctggcgcttgtgatgaagtctggcaagggtacgcagcttttctcgatcgcacaattgagcaatttgctaacattttctctcagttaccatgggtaccaagtccaccatgaagactctccgctctggcaaggccaagctggtcctcatctccggaaactgccctcctctgcgcaagtccgagcttgagtactacgccatgctcgccaagacccccgttcaccacttcaacggcaacaacgtacgttccattcccctttccttcgggtcggcagcctgaaaatggctgtcgcacctcggagtcagctacactactcagagaagaagtggtcaaaactaccacttcggagagtgaagttgctcagcgaagggattgccgaaaggtgtcccggagagcgaattggactaactcgccctatagattgagctcggtaccgcttgcggtaagctcttccgctgctccgccatggctatcctcgatgccggtgactccgacatcctgagccgtgaggcttaagcgtgtcgccctgttgcgagccataaaaatagaatcttgaaccattcttgaacaaaattttccacatgaataatgatgaatcacggatcttccaaactaggcatattctagacaagtgccaagatactggaccgcttgttaaatgcgcttgtcctcggactcgccatttcatagaaatagcctaaatgtaataccaaaaatgcattctattatcatgagtctggccgttcatgtctaaattagaccttatctataacacctatacggcttcgtggcgctgatctcgatcctaagaaatcagcattgatgtccgtgccagatcaatccccacgcaactccgcaatctttgcggggaagcactgtaagtacatacagcctgtattgcttggcttggacagaccactcatttagcctgaagttttccgaggaactatgtgccaccgacgagtctcccgatgttcacgagcagttccatataaaggaggaacttgatcttcagtgagtgatcaagtatgaccagaaactttggctacaatgcgtacacttctcttttttgtctccttgggctttgcagccgctgagaatggcctcaatggctggctgcggtacgcatcattaccctgttcaggccaatgtcattacaatctcccttccagtatcagcatcctcaatgcgactgagacaagtccggtgtatgttgcagggacggagttgcagaatggtctcaagggtatttatgggaagagtgtgcaagtcacacacaactgcaatatatcctcagtcgttgttggcacggttgatcaatatcgcaaaagctgtggcgctgtgaacagtgtacctgaactggaagaagatggcttttggctcgacacgaaagggggcaatgtccaaatccttggacaaaatgagagaggtgctctctatggcacctttgaatacttgtcgatgcttgctcagggaaacttctccaaggtcgcctatgcaaccaatccttctgcaccgattcgctgggtgaatcaatgggacaacatggatggaagaatcgaacgcggctatggcggcccctctatcttcttcaaggacggtcaaatcgtcgacgacctaacccgtgttgctgaatacgcccgccttttggcctcgatcagaatcaatgctgtcgtcattaacaatgtcaatgcggatgctaccctcttgaatcccacaaacctcgacggggtggctcgaattgctgatgtcttccgtccatacggtatacaagttggtctatcgctcaatttcgcatcccctcagacttatggagggctcagcactttcgatcccctcgatacatctgtcatcgcgtggtggtcgaatattacgactcaaatctatgatctagttcctgacatggctgggtacctcgtcaaggctgactcggagggacagccaggcccccagacatataacaggaccctcgcagatgcagcgaatcttttcgccaaagaagtccagccctacggtggcattgtcatgtatcgtgcgtttgtctacaatcagctgaacgaatcagtctggacggatgatcgtgcgaaggctgccgtggaatttttcaaggatctagatggagagtttgacgacaacgtggtgatccagatcaaatacggccctatcgatttccagatccgtgagccagcatcggcattgtttgcaaatttgttcaataccagtatggccattgaactacaggttacgcaggaataccttgggcaacagtcgcatttggtctatattgctcctctttggaagaccatattagacaccgacctccgtgtcgaccaccagccatcattggttcgcgatatcgtggctggtaaacggttcaatcgcagactaggcggatcagcagctgttgtcaatgtaggcacaaacaccacctggcttggtagccacctgtccatgtcaaacctatatgcttatggtcgcttggcttggaacccggcagacgatgcccaggacattctgcaagactggatcagactgacctttgggctggaccgcaaggtactcggcaccatcactcggatgtcaatggaatcttggcctgcctacgaacaatacagtgggaatttgggcatccagaccttgacagatattctatacactcactacggtcccagccctgcctcccaagacaacaatggctggggccaatggacccgcgctgaccaaaccagcattggaatggatcggacggtggcaaacggcacaggtttttcaggccaatatccggatgaaatcgctgccatgtatgagaacatcgagaccaccccagacgatctcctactctggttccaccatgtgaaatacactcaccgtctgcactcgggcaagaccgttattcagcacttctacgacgagcactaccgcggagccgagactgcacagaccttccttacgcagtggaaatcgcttcatggcaaaattgatactgagcgatacaaccatgttcggcacttcctagactaccagagcggccactcgattgtatggagagatgcaatcaatgacttttattacaatctttctggaatccctgacgagtccaagcgggccggccatcacccgtggcgtatcgaagcggaagatatggagttagatggctacgaagcttacaccgtcagccccttcgaaacagcctcgggctcagttgcaattgttacaacttccaacaatacagctggcaccgcttcaaccaaaataaaatttccctctggcacctatgaccttgctgtgaattactacgatgtatacggcggccagtcacggtggaagatctatctgaatgatcacgaaatcggccaatgggttggtaatagtgaagatgtcttgagccacacaccttctatctatttagatggacattcggcgattcgtatcaagttccggggtgtcaagattcataagggtaataccttgaagattgtcggtatgcctaatggcactgagttcgcgccattggactatgtggctttgctgccagcgggtattgtagattagaagcactcttgtctaccttggctacttctctaagtgcagtgtttcatccaactaactactgtatgacaatcttctgaagaaaagtggtggtaatgaagcaggtagtgacacagtttatacaaagcaaataatgtaccacatgtgtaacattcaaaatctttctatccactagaagtactatgtagtctcagttgagataggaagcgaagccatcctcctgtaactatcaatgtcccttttctttctgtgcgtcttaaccgtatgaccgcaatgctagtttacttcagccgctggtttatcagtctgctatagatagtcgatttatgtgcttgaacaaacctatttggactttcttaaatctctctcaaatctctcagataggtcttatgtttcttgattgtttcaaatgattgagaggaacttatacgttgtagttgtccggttaaattgttcaatattgacgctagtccatatatggctagcgtcctacatcataggcgcgcatttccatttccatcgcgtccccatattcaatccctgcgctccaaccaattgtcttattccttctgaaataagcaactggtctcctctcatacaaagttgaattttcccatcgacctttgatacggagaatttgtcatcatgagtgactattcatcgttgaaagtggctgatttgaaggccgaatgcaagaggcgcggcgtctctcaggctggcctccgcctcaagcagcaattcattgacaaattgattgagcttgactcacagacaaaccaggttacaactgcagaaacaactccagcagaagaatccaccgcatcacagccatctgcgccggatgctgtttcgcaagcgacgtcgcagcccgaacaaccagagaacgaacagcttgaacaaggaaaggatgaatcaatctcacatattggtgaaataacagcacccgtttcagtgtcagagcaagctcaaaatggacacacgcaggcagatgagccgacccaagcagatgaagtttcggcagcagatgggaaatcgcaaaaagttgaagacgtcgcaaagcctgccgagacacaaacagagacaattagccctaaggatcacagtgttgcagccgcatcttcccagccaccaatggaagaagcaacccaagatgcgaagaacgaggaccctgcgaacgctcacgaaaaaccgatctccactgcccagacttctgagactgacacggcatctctcccagtagaagaggcattggaggatacacgcaaacggaaacgccgcagtcagagcccggctcctagtctagaggagattgcgaacaagaaggctcgcgcaaaggaaacaaccccccgcgcgttgctgaaagacgatgaggtgtctgcttctcgcgacgaggcgctcggcgatttgaagcctgaagaccagatttcaacagagaaccacacagacaagcaacctatcgagacccaaacagattcacacaaaactcccaccaagcaagatgctcggttccgcaacctatttgcacctaccagtgcatcctctcaactcacctctcccccgggagatattacaatgcaagatgtagaaataacccctgcgttgcaccctgcaacttctgccctctacatcgacggcctcatgcgcccactccagccgactgcactccgcaaacacctagccagcctcacttccacccccggaacccccgattccgatgatattattgatttctatcttgatgctatcaaaactcactgttttgtaagcttcaccagtatcgcggccgcctcgcgggttcgttccgccgtccaagggactgtgtggcccaacgagcgcaaccgcaagagccttcgagccgattttatccctgacgagaagatcaaggaatggattcagactgaagagaaatcccgagaccgcgctggcgctgctgcccgttgggaagtgagatatgagaccactgatgacggaactacggctaccctcgccgaggtgggctccactccctctggacgacgtgaatcaggtttcaatcgtactcctcccttgggcccgcgccgtgatatggaacaatatggccgtcgcccctcatatgcgcctcccgcggctcccgcggctcctgtcgctcctgtggcccctgtggctcccgcaccctcgtcacgacctggacagggcttcaagcctctggatgaattgttcgaatctaccaccaccaaacccaagctgtactaccttcccgttccacgtcccgttgccgacaaacgtctggaccaatttgatgagctgattaagaagggaacattcccacgtcctggtggcgacgagatgcggcgaattactttcgaagcagaggataagttcatcgacatcggccccgaacgatttggacctggacctcgtggacgtggacgtggacgtggacgtggcggacggcgtggggattcctggcggtcttgaactttcgaatgctcaaagcattgccattggccatgtacaatagactcctagcgtctgcaaataagaatccaatgtcaaaaaatatgtagcgccctgtattattcgcccaatacaacatatattgtacgtgttgggtccactcaagcggttaaaaatagatcatagccctacaacataaagaccctttcagcttccggtgatccctaggatatcggcggattatgaagagctgccagattatgcataaccagtccacaacgtcatctcctttcctcgcttactccgggcttcgtatggaaatagttgctgcttcaatattttcttgttgatcaccggtggcgtcttcccctgtcgatccggataagaagataaaggggaaaaaaaggttcactccgtcaaccgtcctctttgccattttcaccctagcagccatcatgggctggccagtgtgtaataccacagagaccgaaacaagtgtgttgcccctccccccgcgccttaatagggtgactgatcggaaatagttgaggagatcgcactctgggatggtggcatttcatttcatctcctcgcgctcttgatgggcggcgcttgcgctattatcgcctgtcttgtatctttcgccctgattatgctacatgcgacacattacagcaagccgatcgaacagcgacagtaagtgcgcctctctagggtagcggttaaggcatcccaaacattgctgacatggtcctcgtccccgcagtattatccgcatcctattcatggtccccgtctattcccttgtcgcatggcttagcatattcttctaccaggactccgtctactttgaggttctcggcgactgctacgaagcgttctgtatctccgccttcttctccctcatgtgccactatatcgccccggatctgcacagccagaaggaatacttccgtgggattcatccgaaagaatggctctggccgttgaattggtttcaaaagacctggggtggcgagcgcctctggcggactccgcgcagtggattgacatggttcaatgtaagatgatggacttgaccagatgtcgggagttttagaatactgatcattgtgcagattgtctgggtcggggtattccaatattgtgtcatgcgcgttcttatgaccattgttgcggttgtcacgcaggcttttgggctttactgcgaggcgtcgctgagtcccgcgttttcgcatatctgggtatgtgaccaagtcttgcgctttatcctgtcgatccactaataacctattgatagaccatcgtcatcgaatcggtctctgtcaccatcgccatgtactgcctaatccagttctaccaacagaccagtcaagacatcaagcaatatcagccatttttgaagatcgtgtcaattaagctcgtcattttcctgtcattctggcagtcagtaagaattttcgcgtcatcttctgataaagtgatttatttattaactcgtatttactttagacactcatcagtcttctagtttccgagggtgttcttgcatcgactgaaaaaatcgccctgaacgatttcaaagttgggctcccggagctgctgatcaacattgaaatggctatatttggtatactccatctctgggccttcccatgggagtgctacgccctctataacctgccaagtgaagtgaccgatttctacggcaacggcaaggtggcatatcaaggtgggcgctacggtgaaagggccttgattgatgccatgaacccattggaccttctcaaagccatcggtcgaagtgcccgctggctgttcgtcggccgcaaaaatcgtatgctggaccccagttatcacgtacaagaccagtcactgggcctccagccaccccaagatggccgcgaactcacccaacacggaactggcacgcctggaggcgtaatgggccgctatggggaccggccctacgaagaggacgatgtgcttctggccaacgcgcaatccaaccctgagatatcgctcacgggcacttcgccgtatgcgtcggacctcgatgagttccaaaacccgccaacaagattctacgagcgaagcccgtcatcttatgacgattccagtcctgacaatctgcagtcggaatcgccgatccgcgtttcctcgcccaacggtcctctccgcgagcaattccctatacccattccggatccttaccatcctcctcctccgtatcatcattcatgatccatgtctatgattcaattataactcagtatagacaacacatcttatattggcagggcttgctttgtatgcatgtttcccctgttattgagctgcagatttggttcttttacctcacgctacccatgagcacttcgagattttttgcgcttctacttttttctttttgtcccgttgtttggataggtatggatacccgcctgttgcatagcggcatgtttttgttttttttttgttctattcttattcccttattcctttcattattctttatctgctatatccccatcgacgcacattctcctagtatcgttgaggttatatttcttgtatagtatcgtttgggcttgacttctagtgtcaccgattggacaaggaaaaaagaggaagaaatcatatcgaagttcgttatttcgtctaaatggccttgaatgggccagaaatgaacactgtctaagcaaagcaagtgaaagacaaggcccaagatccggcatattaccatttggggggtattttcatgggctgatcgtggaaacactcaagaactggctatcacgaatacatcccacttccaggacctccacgcccacctgggccatagaaatcctcattgaagcccctttggagcatggaggaatccttgcgcgcggtggctacgtgacgcgcagtctggatgactgcagatttgcggcccaattcgcgcatagccttgacgttgtcgccaagttggccaagtagtgagatcaataggacgtcgttgctttgcgagagtacttcggtggtgaaggtgctttgctctgacggagaaaggatagagaggtgcgagagaagagagttgacgttgcggaggattgggtgtgacagcttagtggcggatgtattttcctttgatcgatctaagctgaaatccgcctctgagagactggagaggtaggatttgatgagggagatgcgggattcgagggtgcgaacggcattgagacgagtgctgaggcttgcgattacttttccatcggttagtatcaaccatccatgctgcagttgtgttgagactgtgaaaacttacactcttcctcctcttgtgagagttcaacctgcgagctctgcttatttggctctttctgttctttctgcttcgcacgcttggttggctcctgtgtcgcattcaaagaagcggtgccagaggcctggacaatagtatcgataccaatcatctctgattctcccgtttccattgagtagggcagctccctgaatttgatattcggcaccgactcctcgccatcaacctgcatgtccttgcttgcatcgggggcagtatcgccttcatgaacactttcgtacacggttaggggaagtttgccgctatttgaacttgaagcctggagctgtgaagggtggaaggcgaggaagacggcagattcgttgtagtcctggaggatctgtcgatggagggggagatgggcgtcattgggtccagtccatggcgcggttgaccaccatccaacaaggtcgagcgcggggtctttgtgcacatccttgactgtaatatggtcagtttgtactcgctaagaggagacctaattgatctcgtgaggggtttcgcgtacactgctgaagacgttcttcaaaccatgccgccggcaagataatctcatcgttcagtccacaagtaactggacactcgaacgtttgctcaagtgttatctctcgtccattctgctgacctaaaagagcgccgattatcggcccatgctgctgtcgggcagcgtgtcgggtaatttggtcggagacagtgagaagaacgagtgggtgtagctggatatggagacccgaatcggatgacttctgagaaactagactctgtggaggctccatgactgtaggcaatcctgggatgcggaggaacttgtggtgaatgactgagtagtagagacggttagtcgatgcggtcatgtttggtcggcttggtgttgatgcctgaggctgatacgagctttccccgcggcggaggcgcgaaggacgagcttcacctgtcacgaaggcgtccatctcagtttgaagtctgtgaatggtttttaaaagaactgaagatatcccaagaagtcacaatgtctgtcccttcaacctttgatgcagtgaaatcacacctcgctcaagtccaggagaacccctccacggctttggacattcctctcatcgacaagttgaagttgcaactagtcgaaaacaccgaccccgtagtccctgccactcttctgtcgcaaatctcggcgctccttcccatcttgcaagaagaccctacgcctattacaactctcggcatccgagccaccgcctacttcacattcaccaatctccaatctatcgatcccccgatcaatcttgtcgctggcttcaaggccccatcaccaccaatcaacctcctagctctttcactgttagctaaagccgggcagaaatacagtgaagctgctatagttgctggtgattcggatttggtggcttcactcgtggagctatggctttcaacatcttcgggcgaagtcgcacaggctgcacttgacacattatgggcgcttttggaggttgacgttgcgaatcacctggaaactggggaatatgagcatactggtaatgcaagtcatgcaggacagggactattgtggaggagggtattcactgataaggatgtctacggtctattgttcgggctatgcagcctccagagtgatgcccctggtgatctttctaaaggcgaaagaacgatcgcacagggcaggctgatgacactcttagtgaaagccggaagattacgctgggacatcatctcaaccacccaagtaccggaaatcgaggccaaataccagagcagtagtctccttcattttgcaacctgtcatatggtccaagtgagcgatgtcttgatgtatatgacactgctcaacttcttccgcgagctgctagagatcgatggaccgggcctcgtcgctcgaagatctgtgcagtctacttcgactttttcgtcccctgccctcgacttccttgtcgaacaccaactgcattctaaagtgctgagttattatctcgatgagtccaagctagactcggtggatcttatctacctatccggcccaatcatggcatatgtggctcgatatgccgagatgtatcccaaccacttgttgcagaacccctctaccctacttgacgcgattatctcccgcatcaatagatccctcgccattgctagtgcacaatgggcacacggcgaagtacccacaggtcaccttgctattttagcttcactgccccgagtgcttctcgtagaggcaggtatatatggtgccaacccggttcttgcaattcccacaaaccctccgaatagtgaagctctgggcgttctggcgaaaattttccacggacctcagcgaactggaatctctgattcaatgaacttgaacacatccggctcaactccaactgactgggaccgcgaagcagccgcagcgcgcatcctctacttcctctatgtcaaccaacaccccactttctgggacaatgtcgtgggtgctgccgacgtcctagtgatgaaagatgttgctttgtcggctatttctttcatgggggctattacaacagcgaactggaaactctcaccttcagcacccgccaacaccgattcatcgcggttccagctgccctccgaaaaggatctagatcagctatccccggctactaatgggtttttccccacctctggagcatgggcagttctcactccacctgccctaaccacccttcttccatatcttttcaagccacctcgctcctacgctgatttcgtcgggggtggtgcagctgattcccagaatgtcgtttggaaagttgccactgcgaaacatgatgttatcgtagcgctgcacaaccggttgcaagaaacagatggccaagtggaagggtttgaggatatcatgcgaaccctccaacagcgtgtgaacgagggtccccggggacccgtacaatttggcggtgctgaagtaatggctgccgggctatgaagtcgcaataaatttgaaaagcacatgaagcggtctagtttgttctcgtgtattctttctcgtgttcaattaagaacaatatcaagctcaagtctattgtagatgtactccgtagagatctgcattgttatcttagcgcggggaagcatttagagaatctgccagccctagtgctgtttcgggtgggcggtgaagaaatatatttttccggagtcatcatctatccgcagttatttcatgaagaatattccatattcgctaacccatagtaagtgacgttttattacggcaattatgtcacgtcgtggggcgccaaagggcaagaaaccccccggcacagagtttacttgggacgccgaccctggtggggagccagacacagctccaacgccgttataccctgtatgtttgcttcttggcctggctctccaggaaattttcatctttcaatccaatccccaccatgtcgaaagctacagagcctaacgccctctttcctcagaaatatactgtcccctttgctcggaagttgagccccgcggaacaaacccaggtagactactaccgagggttgcgcgagagctttcacgagggtccctactactctgttctcgatgcgtcatcttccaacgccaaaaaaggcagcgctgcgcgcgccaactttgacgctttccacggcatgcccgcttattctgggcggtatcaaaagaaacggcgcactctccccaagatcaccggacgatcttattgtaagttatttttaccagcgttaatcatttcttttccacggctgcatatgactaaccccgcatgcttgaaccactcagtcttgaaattcttcccccgcgagctatggcaaaccctccagccaaacttccgacccgacgcgtccctagatggctaccaggcccaggtttcagccgctgtagtgaagcgcggcttcgaagatgaagaagacgatactggacctgcgaagcgcgtagctgtcggcgaagacgaggatgagggcgatgcagatgcggacgaagccgcattgcttgatggggatgatgaacaggaagaggaaattatggacgacgacttctccgacgatgatgatgaaatgggcggcgattacaacgccgaacagtacttcgatgacggagaagacgatgtgggtgatgaagacggtggaggtggtggcgacgatgacttctgaaaagcagattcacgatacccttttttaattttcaatttagccttactatggctcttcagcgatctggtttatgcctcattggcatgtcctgtatatctatccaatgccactgtgaattattcggtgtgctgagcgcagataactcccagtagcccaggcttagacctaagattcttaacataatacaatcatagaattaaattatcctcaatgtctatatattcaaggtactcttacgaaacaatgcatccgatataaccttccgatgtcggtggtagataaggcggtgggtattcgataagaaaggttgattgggcttttgatgacgtcagccgatttttggaggggcaaagcagaaattgttcagacacttccacatcagagcgcagaatgggcgacacccaaagtctacgtcccttagaacggtctgtgctcattctctatggctccgaaacgggcaatgcgcaggaagtggccgaggaattgggcgccttgactgagcgactccgttttgcgacgcatgtatccgagttgaatcaatgcaagccggtatgcacttatccgcaagacaatgatcctctacagacctaatacctctgaaattataggagtcccttttttcatacacactcaccatatttgtggcctcgactaccgggcaaggcgatttgccggccaatgcgcggtctttttggaagtcgctcttgttgaaaaagctacctgctaccttcttgaatggcataaatttcacttgttttgggctgggggatagctcgtatcccaagtatggaacctataccacaattgtggttttcaatggctgattgtgatagattcaactgggcgatacgcaagctctataaacgactattacaactaggcgcaaatgagatctatcccacaggcgaggcagaccagcaacatccagaagggtgagtactatcttgatcttcacgctatatgtccacgacttacgtgggtttgacacacagactcgagggaactttcctaccatggatgacggacttccgaaaacatttgctagatagacatcctctccctgatggacagcacccgatcccagacgatgtgcagctcccaccaaaatggaagttgcaattagcggtggaaaacgattcggccccaataccccaagctgcagtcgcaaatgaacatcaagcttctacggatgaatatccgggactataccatctggaccatgactcccgacctatcccacatacgctatgtgcgacattgactgaaaatcggcgcgcgactccgcaaaagcattggcaggatgtgcgccacattaccctgaccgtcccaggccttgtctcttacgttcctggagacatgatcgccatcacaccgaaaagctcttcgattgatgtccaaacccttattgatttgatgggttggaacgatcaggcagatcgaccaatctctctcgttccaatgggagatattccatcaccgccacccattcctggcctcgactcatatcccaacctcactcttcgcgctctcctcgtagactatctcgacgtcaagggaataccccgccggtccttcttctcgacgattgcacattacaccaacgatgaaatgcacaaagaacggttactagaatttacaaatccggaatatctcgacgagctatgggattacacgacacgcccacgacgtagtatacttgagatcttgcatgagttcgacagtgtcaaaattccctggcagcacgcaatatctgttatcccggccatgcgcgcccgccagtttagcattgccagcggcggaaaacgcaagcagactgctgatggcaatacacagttcgaattactcattgccattgtcaaataccagacagtaatcaagagaatccgcgagggagtctgtaccaagtatctttccgtgctccggccagggagcacccttcaagtccagctccaacccggcgggctcaagtcatcagttcagcaactaaccgcagcaaccgtgcttattggaccgggcactggaattgcacccctgcgctccatcctctgggagaaagcggcacttgtgcaggcttaccgcgagcaaaaccctgacgtcaatccaccgatcggcccgacaattctcctatacggaggccgaaaccgagaatccgacttcttcttcgaggaagagtggacggagctcagtaagctcatcccgctgcaggtgattactgctttttcgcgtgatcagcaacgcaaggtctacgtgcaagataccattcgcgagaacttcgcgctcttcttctgtgtgttgcatgatatgcaggggtcggtttacatttgtggttcctcgggccgcatgccgcaagctgtgcgcgaggcgctcatcgaaaccttccaaaatggaggagctcctttgccggggcaacctttcacccgttctcaggctgagggctatctcattagcatggagcagactggccgttacaaacaagagacttggtgatcagtttgaatacttggtttacaccacagcatagtatgacattttctattgtacatctagttgtacatctagttatggaaagatgcccttggatatgtacgtaaatcagataggaggtcacaacctgtatctacaatgcgatgtaatgtcaaagcttagacatttactcattttacagctcattatcatgaaaatatatatctgtctatcttgcatgtatttaatgatgacattgtctactctgtacctaaatagctagatgttgttctctggctgcctctagctttggtatacaatgtcactcttgtccaaattctttaacagttcaatggcggtttggccgagtgattcaagatgattcagtcacatgtggtttgcggggatagctcactagagaactacacgaaagacatatatgttagggctaggcgttgacacaactatacaattcatgaccatatcaacagactacagtagactattcttctcagtcttgtcaaatgcaaaacaatatccatcatcacaatatgcaaaccgctggctgtatggttaacctcggcaggtcggtcgtgtgactacggcggagaattgcggccgtcggtaacccatatcacttctatagctagttaaccgccgcctttctatatttcgtggttatttcttaagagaaattgcttgtgttcgtgagccgctcttgattatatcgatttgattatgaacagaaatggtgatagagcgtgcatgctacatacaaccagctccagtgctccagtggggtgtatagaagatgagattggaaaccagtaacacataataaaagggatgtttttgtgttcaaatgagcattcattgctccgtacatagtttctttgctgtattgccctcttgtatcctcgaataatacaaaaaggcaaggtctatggtataccgccatggcatacttatagatacgttcgttgtacaacagtttccacagagcgttattactcaagggtagataatttggaacggctatctagagaagtctagactagcgtcatatatcccagaataatgctcaacttacctataggatctgcgcgggcggcgttcatgctccgaccccaagcgcttgttgccatagtggccgcaaaaacgagcggtatattgaggaatccgtggcgcgacgaggttaaactcgggccgcgtcggcgttttttacctcttggcactccgtcaccgcacgctttctccctccgagcttccaatcttccttatatcaactcaggaattggctgttgctcgactaccaattacaaaatgagtggcttaaggatattggtgcccgtcaagcgcgtgatcgactatgcggtaagtcaagttcccattcaactatagcccctccaagtacagctttgcgcgaccgtcactctgagctgtacctctcaaccaacagggttgtcatccctccatagcactcactctgggattgggatatcacaactgacaccaaatccgaatctaatagatcaaaccccgcatcaacaaggcccagaccggtgtcgaaaccgctggtgtcaagcactctctgaacccattcgacgagctctcaatcgaagaggccatccgcctgcgcgagcgcaagggacccattaaggtcgaagacatcctcgcactttccgctggcggcccgaagacccctgatgtcctccgcaccgccatggccatgggcgctgaccgagccttccacatcgacgtaccggagaagggcgacgctggcctcgagccgctgacaatcgccaagatgctgcaggctgtcgttaaggagcagaacgtgaacctcgtcctgctcggcaagcaggccattgacggtgaccagggtcagactggtcagatgctcgctggtctgcttgggtggccccaggctacacaggccagcaagattgagattaaggatgaggctggtaccatcgaggttacccacgaggtcgacggtggtgttgagactctccgcaccaagctgcctatggttatcactacggatctgcgcttgaacgagccgcggtacgctagcttgcccaacattatgaaggccaagaagaagccccttgagaagaagactcttgccgatctcggtgtcgaggatgtacggaagttgaagactgtgaaggtcactggtatgtgtttctgggtttgctatttggttcgtgggattgtgctaacattgtgtagaacccccgccacgaaagggtggtggcaaggtcgaggatgtcgatggccttatcgctaagcttaaggagctgggtgcgttgtagatgcgctaagcttgctcttgattacactgcgtttctataccttcgcctttgaaatgttacctactagattggaatcgtcttgcgcatttctcccacagtttctgatgggcatgctttgtggcgaggcatgtgtgcatctattggatgctagatctataaatgaaaaacattctttgtatttgatagtatgtactagtcccactagttccaaacgggttggcgttgtgttcaatgatacatcttccctaagcatatagtcatagttcgccaaagggggccacactagtgcaaaatcgaggatcgcaatccgccacaggggcgctagagtggctagatcttgtctacggactaggaactatgcacgaaataataaccaccccgtataggtatggccatatacaatatatcttactcttccaaccttgggaggtctctttattggcaaaactacccaatcggaactctatagcgcccaatttcatctcagcccgaggcaataatatacaatttatcagccacattgcctaacttcccgattggctgtgatggaatgtcccgggagcctcacagctagaagaacattcttaggattgagtgaaattgcaaaagtactaaggaaggatagtatgattctctaattcccccattaggcttaagtacattagtgtagatgtgttatgagatcagcgcaaaagacgatcttgcattatattagttacccttcacagtgtggatacactagaatatggtggtggcgaaagctcagctgaagtgatatccaatctcaaataactgctagtacaaatacggagtatatagggaaaacctagccgacggatgcgtacggaggcatggccttatagcgtggtcgatcagctcagcctagttgagctgtcatgtatgggatccactggggcttgaaggtggacaggtcaaagaacaaatgaacaatgacaatgtgtttcatgttccgaggtattctattcggcagagaatactgagtactacagcatatcggtatatgtagtcaaagtagtctagaatggtaggaaatgcctcgacacgcgttctaccagggcttttaaattttcccggtgggggtatgaggtatgtgattagggactgactatgtatggattaataagagtactatagatacctacgattcgtataaatacataaataacatacagagtacaatatcgattgtcactgcaaatgcaaaaaccaaatgaaaaaaaccaaaaagcgaaattaaaaattaaaaaaccaaaaaaaccacctgatccgtggatgatgacattgcctcgaaccttggaaccatggaagagcataaccgtccaggccctattaaacccttccgtctgacccggaaatcttttttataacttccttttgcctcgtcagtcgctataatctcgcctttcacattttcgacgaactttctatacatttgcgaacattcctccccgcattcctggcttgcaaccgatctcgcattcttcgatctagctggaaacattccggataagaatatatcgggattcatgctgttcgcggcgcaagtcgtgtttcagatattgcgagtatagatctcgccttgatcagcctctcgcggcgcgaagcgcataacctttgctacttcttcagttccccataacgtcacagcctcttctgtctggcagcaattcgttatgtcttctcaaaataaatgggagaagacgttgagcatctcgaaaaagggctttgacaaagcatgggacaccgtcgacaagctgggcggccccgtcaaccgcctgtcacataagctgggtgccgaagccttctggcccatgacaatcgataaggaagccgacaaagccgcgcgcatcctacgcagtttctgtaaagatggattctacgcccccgattcctcaagtggcaccgatgagaatggaaagatcaatcgccccaagggcagacaacgcgttattcagaagatcccatcaaaagtcctcaaaaatgccaagggagttgccattttcacgactatgcgcaccggtctgtggatgagtggctctggtggtagtggcgtgctgattggtcgcatccccgagaccggcgagtggagccccccatctggtatcatgttacacacagccgggataggcttcctcgctggtgttgacatttacgactgcgtggtcatcatcaacagctatgacgcgctcaacgcatttaagaaattccggtgcacccttggtggcgagattagcgctgctgcgggccccgtcggtgtgggtggtgtcctcgaatccgaagtgcacaaacgccaggcaccaatttggacatatatgaagagcaaggggctgtacgcgggtgtcgcggtcgatggcacgatcatcattgagcgaacggacgagaacgagcgcttctacggcgagcggatatccgtcgacgaaattctctccggcaaaatccgacatccaccttacgagctcgctaccctcatgcaaacattgaaggccgcacaaggcgacaccgacgtcgacgggagtctcattccgccaccgggcgaaacacctggcgatatggaattgacggaagacggacaacaaatctttggcgtgccggctgtggacgaccccgatccgtatggagtgaaggcgctggaggcggaggggcttttcatccgcgaggccggcacgaaagcgaggcccagccatgagacatttgaatttcggcctaacctagacagtcctatttatagcactttctcgcggcgcagtatggatagctcgccgcgtaatagctggcgtgctagtgtgcagagcgccaagagctatgctagtgtcaaccgtggcacgcaaacgattgatgagccgctggtcgagcccacgtctgtgagccgtgcgtcttcccgcaggtcgaagggatcgtctattggccgtcaaccgatgaatacctgggacgaaaatgagcctcattgggatacgattgctatccatggcaatgaagaacacgtgaaggtccgccaattggaaggcgaggaggcggagcataggagagcgaaaacggatgcctgcccagatgcacacgatgaccccgcgttcgaggatgaagacgagcactttgagatccacgagcttggcaatgtcaaggtcacaccaatggagattgtcccagcctcgccgtcgaaggtggaagaccagacgacaggcaagcctacatcgcctagcttcacccgggctcgtctagtcacaatcccggcacgcaccccgccccccttgcctccgcgacaccccggccacgtccggggctctggctcaagccgtgcctcaatgtcgccaacagcgctctcatattctagccgtaacacctcacctacagacgccaccgaggtggtggagaataccgaacatttggatgaaactccccacgccattccattccccgagaccaagacctctccccatgtcactcctgcgagcgatgacgaggagattgtcgagaaggacgaattccactctgtcgacggcgagtcggaggatgaggataacgtcattctcctcgaagaccagattgccacccaggccgccgagcaggagaacaagatggacaaggaagacgagaagacaaattcactcgatgtccccaagcttggacctagcatcaaatatacccccgaggttgaagagaccctcgacgagatcgaagccaagcttgaagctgagatcaatcacattcctgctgtccacgaaaaacatgcagagtcccccgctttgactgaactcgataccaccttgccccatgcccgggctgagtgatcttagattctgagtaactgtttttctgcttcctctttgcgatttcctcggcattctcgtttccgtatttttctcgaaacacaccttggcacgatacctcttacgcattctatacacatttaactcatttgggagttcttggtcattcagtctccattttcatacttcttccatccccatctcatctccaaaaaaaggcttttctttgttggtttcctgccattggctttagcgtgtctgcattttagcgattggggggtattttttttgttcctgggtcaggccgatggtgaaggggttctttgggctccttgccttttactttatttgaagagctttcgctcgagttgcattatatcctgtttcctggacttggaatacgctcttttatatattggtatttggctaagcttgactttggtcggttgaattatataacatcagtaattatccagcgcaggtctattaaatgtacagcagcatgtctcatctcaagtagaaatcatccttcgaatctattatccttttccatgagaaagtagatggaattacccacgtataacttctagaaaagcatagctgatgctgctttagattgagatgcttcagttatgatagcaaagccttctagaggtggaagtaaagacaccgaggtatttatatcagtttgagccgatagagaaggctcgctcacagaagagaacgatcaaaagacagcgaaagtgtcatgtatgaaaataattaacccgatagaaaaaggggtgggttaatccggcggcaatatttaagtgaaccaatcacaggaattagagtaaacctcccggaaaaatggagatctacagatttgtatggcgccaaaggcttcattttcgacgatcatcggacctagttattccgtgccgacattatggtgattcggaccaacttccaggcattaaggctttgatatggtgcaaacgacccctgcgatgctgcctacttttctttcctcttccttttctctcctcttgaccatctcccctcattctctctccttgaccatcttaccccttatttccaatcctccaactgcatgaaacactcattcgataccacagttcgagcgaacctcgagcagtcactccatactcttttccggcttccgaactacaatatttgcaattgactgttcaaagtctcctggtctcccttgaacaaatgcaacatgacttcaagtgtcgcgcgaagctcgaaaggcagcattaagaagtgagcatgatggctggaaatgtttgtttattgttactaatttgacgcagaattcaaggaccaatagtggcaatcacggtcggggcatcaaaggaaccctttcatgtgcacgaatcaatcatctgcaattcttcgctcttcttcaaaacggccatgtcagggtcttggaaggaatccaaggaacacactttcaagctcccggaagatgaccccgaaatctttgctctatatttgcactggctttacttcgccgaaatccccgtgatgcttgaaaaatatgcagcgaaggaagaagcagcaaggcaccgttacaaggagtaccataatttcgtcgatgcatatgtgctcggtgacaagttgctcgatggcaagtttcagaattcaatcatcgatgcaattctcgagatgtgttctacgcctgatgcacacgatggaaggaaatactatcctagtatggcggtgatcaagcatgcatacatagttacgaccgagtctgccggaattcgcaaactgtttgtggatttgtttgtgaacactgcagcagctaagtggctcagcagagaacttccagcggaatttctctattcggttgctgaaggcctcatgattaaaagaacctcgtatggtgggccaatcaaagcatcccagtattatgctaagccctcgttattctaatgtggcaatgtgactaccccgggcttttctgacttcattctgacttcattcatcttcccaccttgttttgaatgatctctaagttagtccaggcaagtagatatataatggtcaaattttgtattcgtttcatttcttgaaagtccgtagctaatccagctaatcggtatattcatcttcgaccttggtttagccagactcattccttcttatagtctgcactggtgtgtctactcgagtccttacccctggaaacatggactacataaattagaaaccgccgaatgaagaatagatgccgtgatatccgacagtcaaggccaataatgcagatgtggacactggagatatgaaaattccgaaaagggaaagatatgccaggacgttacctcgttacctccgctaagtccgaaagcttgtgcaactttatttgaaagtatcatacctgcttgttccaaaaggacacatcctccgagattttcatctcccatcttttcatctccaggctcaaagcatccaaaatgccttcggataaccacatcaaagcagccttgtctctcatcgaggacaagtccaagatccttggcttgaccatcggcaactatgagaacgtgcaacctggaacatacctaccccgcaaaggtacgaagcagtctattgcctgacctccccttccccccccaaatcgtgtgacaggcaatccaaatatgggactaacaaaaaccacagcatgtcaagagcccccgaagctctccttcactggcaccaaccctaacagcacctacatgatcgtgagcatggacatcgatgcccccttccctggcttcggagtcctgggtcccatacttcactggatccagtccgatgtcaaagccaccagcgagggtgtgctggagtacgaagcgcccttcgtcgccaactacatcggccctgctccccctccaatgagctcgccccatcggtacaccttcttcctgtacgaacagcctgcagactttgatctcacggcccatgcacctgctggtggtaagaagcttggcaactacaatcgtatgtggtacgatcttgatgcttgggcagagaagatcaagcttggtcctcttgtggctttcaactattttaccagcaactagctggtttttgatgttaaccgggttatggtttgatgaagtttaaatgggaagatacgttgtttctcgtgatcgttttattctcgagtccagagggatctcactaattgtcagtcaatgaatgttgctttactttgactaaattaatcaataactccaaatttttcaactcaacatcctatactgtaataaggaatgcacatgtgtcttctcttgcttcttgctttggcagtaatagacaggagggcttctcgatgagccactcagcttgtaaatcatctactaggtgatatctcagccctcatacagccctcagcctcaggtttcaatggagaatcccgggggcttgaaaggaacatctgagattgtctttgtttattgtttgtctgtgccattattgcagtgtcatcaatagtttataagggtagtcaaattcccccacaaggaatttctgcgtttaatttcatgggtacttttcttagtgtggtttattttccatcggggaagatggcttccaacaaaccggtagacaagctggctgacaatctgaaggggttggtcatcggcgccagcggtacaatccctggatatcaacatggtatgttttccctcatatcaaagcagatctatggaaagagggagagagacgtttcctagatataatttgatgaatgacacctgttatccagaggaaatcaagcggatggtcgaggaatgtggtgcgaagtttgccgcgataaatatcaacaaatgcactcatctggtgacgacagaaaaaaatgccaacaaagatttgagaaagagttagttgcataagcttcgcattctgtgatataaagtgtctactaacagggtgattttgcttcagtcaatgtggctcgtgaactagaaagctgccaaattgtgaacattgattggctgcttaagaagatcggaaacgatattccagagcatggccagaaaaaaacaatcaagggcgagaggaatgaagagagcaagcccaaaggcagaaagcgtgcgcgagaatcttcagttcgggacgacgaagacaacccttcgaagagaacgaaggatgaagaacagatcaagctcaagtatctgatcagtttggttgatgagaaatacccaaacccgagttagtgatacgatggagtattttcgaagacctttctaacacttcggtattaggtagcacgctctccgtttaccaggacgacaccggtttgatatgggatgccacactggtcagccttggtgtgagaaaagtccaaatttgtcgcatacaacttctccttcgtcgcgagtcacaaaagttccacctgtggaacttgcagtaccaatgcgggtcatccgagacgtcaacatcaattggaagggtaggaagcctcgactcggtcaagcgtgcgtttgaggtgaagttcaagtcactcagtcatctagaatgggaagaccgaaatgatattccttcttctaaaggttggattttcctccagatgcctcaaagggaagttcccgtcttcaccagccggatcagcccgttgcctacaagcgttgaggacgttttgaaaatcatcttcacatcaggagcagacttgaaaaactatgtccatttgctaaacagtcaggggcgcggtatcttgcttgaaaaccaagtggacaagaaaaagctcctgatcgggattgcagtcttggccaagctgatggagctcaccaatcctcagctaaatccttgcgacacttacaaagcgaagaacaaactgtgcaacttctacaatcacttgattctcacacaagggactctttcggataacaaagatattgtcagacaggagttggaatccctcgatctgttactcaagttgcgcgatgccagcgagattctggaaaaagattgccggtcttcttcattggcgatgagccagatatcccaagtagttggtctggcaaaaatgctcccaggtatatatcctttgtgccttcttatagtaattccttgagtgcgttgcaaagcatgaatctgacccttgttgacagtgaggagagattcgacagagttcaagatgctccaggagtatattgagaaaacttcttattcacaacacatttatcaattcaaggtaagctgcgctcaaatgacataagcaaaatcccagtctaacgcattcatattcctaggagatcatcggcctgttccgtctcgaacgtcccggggaagcagagcgttttgcccagtgggaaaaggaaaaccttgctaacatcggagatcggcgacttctgtggcatggctcaaaagctagcaactttgcagggatcttaagccaagggctgcgtggcgacgggattgtcagtaccgatggaaagcgcttccttcctggggtatactttgccgacatgtctactaagtcggcacaatattgcaaagggaatggggaagtcttgatgttgttatgcgaagtcgagctggggaaatccacggctttttcagtccaccatcttggcatgactgtccataataaatggcgcgatgctggatatattcacccagatttcaaggggtgccaagtgccagatgttcacgcgggacgatcaactacaaccccgaacggccggcgttattacacctctgagtatatcgcgaaaaacccagcacaaattcgtcaacggtatttgttccatgtcaagctcgttcaaacgccagggacttagggcgacgatgattgagggattcgagttaactacagaatgttgagattttcctatctggaggtatttagatttattttagttcaatgcaactttagaagctctatatctgcataatcccacctcacagacatcgggtagtggatgaatatgtacaacatagctagggcatcgaatatcaggtggttttgtcttggcacttcccctcccctcacttgcacgagcacgagccacattgacagaattgttgccagggttgtaactcttctctcggggtattcttttgcttcccacagctcgttcacgtcatgattaatttgtggaccgccgctctggtagtaagtgctgccgcgcagtactttccgcccatcccagatggattgaaggtggttgaatcgaagcatcagaagggagtgaagatctcatacaaacaggtgtgattattttgaagtcgttggtatcacataatgtcatactgataaatttcacagcctggaatttgtgaaacaacaccaggggtgagatcatactcgggttacgtccatctacccccaggctctctggacgatgtaaatgttgatcaagactacccgatcaatactttcttctggtttttcgagtctcgtcataacccgaaaaatgcgccattgtctatatggatgaacggaggcccaggaagttcctccatgattggcctcatgcaggaaaatggaccctgcatagtcaacgaggactccaattctacggaactcaatccctggtcctggaataactatgtcaatatgctgtacattgaccagccaaatcaggttggcttcagttatgatgtcctgacgaacggtacctttgatcaggttaagggtgcctggaacttgtcggagtggtccggggtgcccaagcagaacaacactttctacgtcggcacgacagctagccaagataagtcgactgtggctaatagcactgcgaactccgcgcggtcactatggcactttgctcagacctggttcaccgagtttccgcattacaagccccatgatgaccgggttagcatctggactgagtcatacggcggtcgttacggtccatctttcactgccttctttcaggagcaaaacgaaaagataaaaaatggcagcatcgatgcctcgggggatccacactatattcacctggatacactgggcatcatcaacggctgcattgatctcctagtacaggaagcgacatacccagtaatggcatacaacaatacctacgacatccaggccatcaacaagaccttattcggttacgctatgaattcatggggccgccccggcggatgcaaagaccagatcattcactgtcgcgcgctggccgcagagggcgatccgcaaatgcacggcaacaacgaaactgtcaacaaagcatgccacgacgccgacaagttctgcagcaacaatgtcgaaggtgcatacttagagtttgcagaccgtggctactacgacatcacccacaagaaccccgaccctttcccaccgtcctactacttgggctggctgaaccagcactgggtgcaaggggcactgggcgtcccgattaacttcacccaatcaagtgacggtgcctacaatgctttcaattctgtcggagactatccgcgttcagacgtgcacggctacctcgaagacctggcgtacgtgctcgactccggtatcaaggtcgctctcgtttacggcgacaaagattacgcttgcaactggattgggggcgaagacgccagcttgctggtcaatcatgctagtgcttctgggttccggtctgctgggtacacgcctctacgcacaaactcctcgtatattggcggccaggtccggcagcatggcaacttttctttcacccgtgtctacgatgctggtcatgaagtcccggcctaccagccacagactgcatatgagatcttttatcgttcgctgttcaaccgcgatctggccacgggtaagatcaatactgcacgtaatggctcctatgccacgcaggggcctgcgtctacttggcatatcaagaacaaggtcccggagagtccggatccgctctgctatatccttgctttggggtcgacatgcactgaagaccagattgcaagtgtgatcaatggcaccgctgttattcgtgattatgttgttgtggaggaaagttgaagtacctcatgtaagctctatgcattattgctcctcatgtattttactagaacacacgaaatgacatatagaaatgagtatacatcttctataagtgagacttgttgtgacgatgtcctcgtacgttcgatatccaatacactctttgcttgcagcgaaggcgaatatctcaaacataactggtcagatggctcggtggctgagtcaactcaagaaggtcatgaatagcacatgagtggatatatcgcatcttgaacacgataggagaattcgagggtttcacaagctgtcacagcctaagtgtaggttttgcatcgcatggaggtttgcgatgtctaggttcggcccgagccgtggtggcgcccgattcgacggatggcgggtctgaaaaccgggtctctggtttccaccaggtacataccgaggaagtaaagtaaagaagtctcctcacggtctaaagaaccctatggggttacttatatatgtccttgagatattcatatggtcgctgatctgtagagtcataaaacagacaatcatacagatggtaacagtaaccagaccggatcactgtgtttcagtatacaatcaattcacaatgctgtatcctccatgactgaatatgaaaagagcagtgatcttggcattgtcttgattgaaaccattgtatgcactcgtattataatttgggatgagagaattgtgaaagtcaagcatatgacacatatctgagacatcaggtagaacaatgaaactactatatgtgactgcaaactaagctacgatatcatatcctaaggaggaaggcacctgcccagtcccagatcaggtgccttcccttttggtcaaaaaccgtcaccaaccccagtttcctatttacctttagctactgggagggtataaatacctgcctctcccccctctccctcttcttctttctttcttctccaacactccgggcccacattgcacatcgtgttcctgttgagtaccctttaattttttgaacttttgccagctccagattcgtattcaacatacgtctgctgctgtccagtgaagggaaatcctgaggattctgattggaactttgctgcggctcgttgaaggctgaaactaggttggggcttcggtcctggtctaatggcacgaagcatgttacggtagaagcactctccctctgaccactgcggatacagactgtacttctctgagttctccattgtccattaggagcttaacaaaaggggctctgttctcatctccttcctacagggataactctctgttcccaatgatgaaacaataatctgagggtagaacgttccttccttcttcaacccagctgcacgggtcatgtgtgtagcacctgagcaagacttgcacctttacgtggtgttcaggatgagtagcctttacggcgaaaccaagcaagtcattatctagaacagctattaactgcaatattaaatcatcagtactcagtacaacattgtgcttcttgtaagaaaccaccggacattgaattattagaactagtatcaggtaacctgcaggtagagactagcgccagatttcccttgtgtcgatcatgttgatcagtcctatagatctcacactgacgcacctggaatgtgatctcgattgctgcacactacaatgcctaatctctccgatcacaagctacaacagcatctcttgcgacattctctctacttacggcgaaaccaagcaagtcctcattatctagaactgcaatagaacttggtattatatacttgactgtgtccttttgtaaatgcttctgtcgtaacctgtgccttcatttccaaggtttatgtaccgactctcatccatggatatcaaacttcttttcaaactgccacaacaaactgccatcaccacaaacaccttacattacagtgagtatcgaccagtcgccttctcttattcaatcatattctgactcctgaagtgttgcataagccttctaacgttggatattagacaacaaacctttctacccttagcaaattcaaactaaaatggcatttccacaccggttcggctggctcgcaagaccatcaccattttctacgcctcgacagccccgactgagtccaggcaagacgggacggttggtgacatacgatatcacttccgagatgcagtgcccactattcgatcggctgcggtgctgctttgagctggactttatgtgcggatttcaatctacatggggtcttcatgatcaacgctggactgaggatggagaacagttccatcgagagaacgaagaggcagcacgttaagagtcaagacactcatttctttgtttttgacactagctaacttagattcttgtcacagttactccctgttcagaaaccaaagccctgttcagactacgacatccacccggcccttttcctagtccccgacaaatgagacgaacccagccccgaccagagaatatgacagcaaccaatgtcttcatgtaattcaaagtatccatggtctttttacaaaacggtagccagacataccattggcaagaacatgaggccatgactgtgaaacttataccatcctgaggccagccatgacttacgcaaagcaccatattgtacgaatgagttcagtctcattccagaatcctcatttactgattatgaaacccttctcggcggcaagataccattctgaaagtacgccatatttgtcaatcacttgttcaggaacatccagtcctctggcgatgtactctaaaagtcaccaatatcaatggcgcttgcttctcattttcacagaatcacaatcgaagcttgccatcactctataactcgatagtagacttatgcatactgcagttcaattcaatgtcatcaccaggtcatgacggcaatcttgactactctctgaaacaatgatcttttactttcccctttccggaaccacacgcacgcaaaaatccggtcatgcgctaggaaccttatgcatgcattgtcggaactatacggcgaaagtaccctcgtttcttaatgctgagccctggtacacttgacatttgtctgctcttagttcgttcgctctatacctatagttgatagctaggtacttggtcttaggatgcgtagaaatggcaatgcttgtcaaatgagcatcagcacggcatcttacaagttcccaaggaggcagcgggactaaaggccgcatttggatgatgatatccattatttccggcagaggtgacagtcaatctcggctgggaagctgcttggacgtgggcttgttacatagatagacttctgcgcctttggcttttgtacatcagtcccagttggagagtatggtatttttctgtagactacattttagtttgtctatgcgaacataattaagttggaatatcgtgattgtggttctggatatactagttaaaggctcatcaagaacctcgtaagatgagtactctggaatcaagtaaaaagacgggggataaatgtcaacgctattgaataaaccatccatatcataaaccaatcattccttcttatcatgcgcagtctcgaccggtttactaccaacgccagacgaccaagcaacacgagcaagccgccaaagcacccagatgaacccaagagagatcaccgcacaagtaccaagctcgatatatttaccctggaagtagccctcctcgccctcaagtcgtagaaccggcacatcgatctcctccacaagacgatcacctgtaggctgaagctggtagaatagggttcgcggaccgaacaagctgtcccagcctagatgtgtgcggtcgaagggattcacactcatcttcgtgctgtcctcggaagtacaagcccagaagacgacaggccagggaatgtaagctgtgcggtgtcctgtttcggatggtggcaggtaccgcaggtgcagaggaatggtggcagtccagtttgaggaatctggtgtgttggccgtttcttcgagttctgggggtgttgctagttcgaagagccagttggagccccagcgctgaacaacccagtctggggcttccaggtccatttcgcctgctaaggcttggagggctaggagattgtgtgactcgaggaagagtggatctgttgtcgcgagctggtattgatcgccaaatatgacggaggggagggtgaggtatgtgtgcagaccgcaggttgtgtcgtctggtgctgtgggtcgtttgagggatgaccgaggcatggatatagacattgttgggtgaagaccagtcggggaggcgaaggagacggtgtagctcgatggttcagtgagagattggtgacgggaggggaatgagaacatagttggttctgtatgatggttagacaaaattcaagcgatctgataacgccgaagccacatacttagcttctcgtcctctccgacaaccgctaacagcccgcccatcttgatctcctctggctcaagccctgcctcggcgcccaagagaccgaactcgacttgatcgtcagcggaggctggcctttgaaacttatccgtccaaccgcccgtaggtgaactggcccagagcccagacacagttaaggcgtgtgaagtgctgtcatagtcgatatcgaccgagtccgcagagaggagagcatcggcccgggtgtggcactcgcggccacctgtacgactctggtcacagacagtgttgtgaatatatttgaccagcggctgtatggaagggagtcgggtgtaatattgtagagcggccgatgaaccgaatcgtgttgaaagaagcggaggtgtaatgaacgcatcctgtgtagcagattccaagtcagaatgaacacatgcaagatatggccagggaaagccctcgaaagaagggaacaatggcgaaatacctcctgcttcgaacaattcttatattgggcgtccttgctgggcgctactatcgtgcggagcagcgtgcacagtgcctctctatcgataaccaaatccgtcaatcgcatttcctccaagcctaagatgtagggatgagctcacgaagatgattccgatccgagcggagtataatggacatgcaggccaggcgaaactcggctactgaatggcacgacagcatcgaaagacctctcggaggcccagcgaaggtggagctcatgggattgctcgaggacagcacgcaactaaacacatagtaaccaggtcagcattgtgtaattcttaacagatcttcaatcgacaatgccttctcacctcctctgggagctcgtccagtccgaccgtaatgcgatcctcccgcgcagcgtctatgtcacggacggagagggatgacgtggttaacacagcttgctccgggtcgaaggaggcattgacgctctggatgaaggtgattcttcgtttcatggtttcgatcaagggatatcgagtggacagtaaacagaagtgacgaagtccaagattgatctctccaaggtgtcactggtttctccgcattcgctcaattgggttagactacacatatggacattacgttattcggtcacgacttcaccaggtaaaacttccaaggttgtatgcatatattgtacatgaagatggcttgtcaaataaaagataaaagtgcttattaaaaaattctcatacaaaactttgttcgtgtcattgtcattaaatacgccctctttcgccccaaacgccaggtatatgcaattagaccggatccttctaaggcagcacatcccggaggatatctttttgggagctagtcaagctagtggggaaagtgacgttggcgcggatgattaggtcgccgcgggtgctggggttcttggagatcaccatgcctagaccggggtagcgctcttcatggcccggctgggttggaccaggcttagacacgcgaattgattttccgtcgatggtgcggacaatgcgttcccagcctgtcagtgcttcctttaggctgagatcgaccgtggtaataagattgtcaccagaacgcttgaaagtaggatgatcgatctgtaaacggttgttagcaatggttcaagtgtcttcatagtaaggagcggtctcatacctctttaacaatgagatgaacatcctgtcgtcctccttcttcctgatctccaatatttctatacttgatctttgagccagcacgcagcccaggcttgatattggcttccaaagtcacctccttagtagtgagcctgccctgtttgtcaaaggccttgctcttcgtcttcaccttcttagaggtacccttgtagatttcctccaaagtaagaggcaagtctttctcgatgacagtcggttcaggggtaggtgcgcgcggcttcgagaatcccggacgactgctacggaagccgccgcctccaccgccgccgcccagtcctcctgcgagcatggagataatatcttcttcatccatgccgcccatgccgcccataccacccatgccgccgctatccttggcaaagctgcggaaggtatcgttggcatcgctgaaactgaagccgccgccaccgccagggccggtcgagaagtggaacttgcggcctcctccaccgcctggcatgcctccgggcattccgccgaagttgaatccaccgggcatgccgccttcaaagccagatgggccgcctccgcctgaccctggtgggggaggtgcagggccgccgcgcatcagatactcgaggccgaactggtcgtagacctttcgtttttcgggatcagataggacttcgtatgcttgagagacctctgtaatcagactgttagtcatgcgtaacaaaccgaaactgtgcgggataacgtacctttgaatttatcagcagacgaagggttatccttgttcttatccgggtggtgcttcaatgctgccttccggtatgcttttttaatctcgtcttgtgtggcatcaggcttgatgctcaacacgtcatagagtttgctctcggcaaccatattgcggggtaaggatgtgttttatgttaaaatgtaaacagcaggtcaaaaatgatgagcctcgaatcggaggtggacacttatgaaccaacgatgagggaaaagattcctgcgtggggggtgagggatggtacggtgtgcctctcgaatgatgtagaaggttcgaagcggaaagacggatcgtatgtaagaggaattgaggatttaaggagtgcggaaaggcacgggttggagatcatgagactggagaagaaatgaagctcgagaaaatcctgcaaggaactggaaaagtacttgaatgtcagtgaccaaggtggtctccaggtgggtgacgtcagcggtgaagtcttgacgtgtgtgacttgggcccatcgaagtttcgagaagcttcgatcgaacagcaactcggccaattcgacgagaaatgctcaggggaagggtttaaatactatttagaggttctgtagggtaatattgcttttttcaatctgtttcaggagttgcaggggactttttggctgcttgttgactgcgatctacaattctaccgtttgtggagtataacaacgaggatacaggtcccaccgaccagacattcggaggtacctatcttgatatatccattcatatctcgtattgatcatttatctccttactttcacaatgctttccgtggtgaaaacaaaaaaaatgaaatgaaagtgaagacgaaagaaaaggtgcgaatgggtttatagtggccggaatcaggaaaaaagggcttatcggtactccccgatataaacaattgggtatcaactccgaactcccgtcaaaccacctcaaatccccatctcgggtaaaggccatgggacatcggtcattaaaaactgatctaggtcaaagttctgcagactaggcatatcaatcatcaaatcacccagccacgagaactccgcatctgataccagcacgtctggcgcaacctgctgctgcctttcactctggttggctaacgcggtcggtgcaatctgcctatctttctgatcaaccgctggagccgccgccgcagcattgacccgcaacacctcagcaagagcacgtgtatcatcctcctttcgccgctgatgcaacgcaatcagtaggtatgccgtggaatacgcctcacgcatagaaggtgtatcataggcagcgaggacttcgcgcagagtccgcatcgcatcggcgagcagcgccaacgcagcccgattgtcaatcgctagaagtgagcagacaacttgaaagggaacattggcaacttggtgccaggggcagctggaggcgaccattcctcgtgcggcacggagcccgcggcctgccagtgcaagaacgcggtcaatgagattagaggataatgggccgtgtggatttagggcgcggagacggcgataaatgcatagcattaggttgcattggactaatattagcgagggttcggaatagaggagatccaggacggaggcgagggctgtttcgagttctgggagatcttgtggtgacggccctgttggatcgaggttttcggacagtgggaggaggtggaagagctctgcgcgtggggctcggggtggtgcttgctggggtggattgcgggattggggtgtgattgtaggagagggagctgcggcaccgtgaaggacaacgcgggagcgaccaaggtcgaaggaaatccatgtgttgagatgacgagccatgccaaagagtctttgcctggttacggggtcgctggttccctgttttatatcgccatcttgtgtctcgggcggtgatgtatgaagcaggcctgctgcttctggatctgaagttccaagatgtagtcctgcagcctcgatgagatgcatcagtgtacaactggccatccatgcagcatgtggtgaggctgtcatgcgtaaatacgcagcacgcaacacccagcctgtcactatgtcgaccgagggtgtttctgctgcgaggatagtcttatccagtagagtgcgcgcggtctcaatgagtcgaagttccactgctatgatctcgcgccgcgaaaacagatacccaaaggcagccacgccgcatagtacggcatcataggggtgttccgcagaatcattaggagatgacaaaagttcccagcgctgtacgattcgagtaaagaaaattttgcggtccagaaatgtatagcatggatcgatcttctcgaagtagattgctgctagccgccgcatctcttcctgtgtgataagtttggtgatagtcgtcggcaccgtgacaggcatcgagggaagggccgaggatagtgttggcgatatccgtctctcgccgatgttccaggcaaacaattgcaatcgtggtgcatgagccgggtcaattctgagcccaagtttgcgaacaaacgcggcgccagaattggcctgtagggaatgagttacgccctctgaactgcttgtacagcggggagaagcctgcactgtagcggcctgttccatattggccgaggcgccgacggtatttgggactgcatcggaccagccatctgtaggccgttcactgagtgacaggctcgctcggtacagactatgcggtatggcgcgtttcttgcgcgcactgtattggcattccgcatcggtttgggcgcaagtgctacagggctgaccgcctgaacatttgcgctttcgtgactgacacaaagtgcaggctaaacgcgaacgctttcgaggcgttgactcggacatctttgaaaaaatacggggaacattgcggggggttgaaagggtagcatggtgccaagcaaattaaacatcttcccctttttcatttttgaactacacgaaacttaactacatcgatgtacgaggtacacttggtttttttcatctctttgccattcacatttcggcttaatcctcatattctcttccatccggatatctcatcatcccctcaagttcctttagatctggcattcccgatggccctggcatatacaagaggttttcccggagggtcgtgccattccaccatatttcgttcttgtgcagcgcttccatgatcttcggcgcgtcgatgtacgtgcggatctcgaccatctgaccacgataccaacgtgtgaaccaaacattgatgatatcgaacttgtcacctgtagtgggtcagcaactcagcaatgctgaaggcaggaagatttccttactcaccagaattcatcacccctttgaactgaatctccgccactgaccatgcagcgttacacccgccatagattccctgggggtggatttcaaacagatccgcatggtcaaaaaacaacatgctgactcgacgcagagcattgacgtagaagtgcattaggtccttgtagtgtccggcgattgggtgatgtccgacgacggtgaagctgacatttttgtggatcagcgtgaatagcttgctcatatctttctcgagatgtttgaacgagtcccaaatgtgcggttgagacgcatatttgcaatctgtggatgggttctcaaatttgaacccttctcggtcatggggtattgggtcgtccacaactccagtgccattgcatttgccatctgggtcaacaagtccagtgccatcatcacatcccgatggcagaagtgggctctggctgttgtctccggggattgagagaatggagcgtccaaaagtcgccgagggcaggagcaatgccaatagggcataggatagatattgagttaaaatcattgttcaatttttgcaatgagaacaccagaggctagctgtcttgatcattttccctcgtatacagcctggttcttatatctggtgctgcctgcatttcattaatgcgccgtatgcccgtggccgccagcgttgctttctacattgttaccctaagtgtaaaaagactctctgtgtgacacaaccaaacctaccgaaattttgtaattgaacggcgagtttcctatacagaagaccgggaattgagcgtatccgagtggcgaatggcgcgggcaaggtgcagggctactgcagtgtgccattggttgtggcaatagtgtggtgtacagacaaaatccaggccgttaaaccgcctcgatgggtgatatttcctatctttggctccttcgaatttatgtaaatgtgatgatcccattgaaaggctaaatagttctctgtgcctgatagataccattgtccaggccgaacccggcgattggatgagtcagatctaagccgataacagaatttgacgccctccgattggccgacaccggcaaagtcggtgagagcacgtgcccacggagtcggggtgaaaaacctcttgtttccttcttttccgtcttctttctcattatttctctactccagattttcaacgcaaaagatctccatgttgcgctaaatagcaaccccctcatctctctctaccatactctgactaccacctgctagtcgcgcttatgtgtttggcaccctcgatcttcacctcccaggactatatctcggaccacctctggaaagccaacatcaactgaacagtacaaagcttcctactgaattacaattgttacttataaaataaaaatgatctccaacctcttcaaggcaatgcctgcccgggcttctgccttcgcctccatgagccgaacctctggtcaggcccgcttcatggctactgtgcgccgtgccgctatggagcctgctaccttcactatccgtgatggtcccatgttctccggcaagtctttcggtgcccgctccaacatctctggcgaagccgtcttcactacatcccttgttggataccccgagtccttgaccgatccctcataccgtggtcagatcctagttttcacccagcctctgattggcaactacggagttccctccgccgagaaggatcccaatggacttttgaaatacttcgagtctcccaatctccaggcagctggtgttgttgttgccgatgtcgccgagcaatacagtcactggactgctgtccagagtctgggcgagtggtgtgcccgtgaaggtgttcctgccatctccggtgtcgatactcgtgccattgtcacctacctgcgtgagcaaggctcttctctggcccgtatcaccgtcggcgaagaatacgacgccaacgaggatgaggctttcactgaccctgagcaaatccacttggtgcgccaggtcagcaccaagcagcctttccatgttgccgctgctgatccccactcccacgttgctgtcatcgactgtggtgttaaggagaacattctccgcagcttggtcggtcgtggctccagcgtcactgtcctgcccttcgactaccccatccacaaggtcgcccaccacttcgatggtgtcttcatctccaacggccctggtgacccaacccactgccaggacaccgtctaccacctgaagcgtctgatggagacctcccaggtccccattttcggtatctgcctgggccaccagctcctcgctctggccgccggtgccagcaccatcaagttgaagtacggaaaccgggctcacaacattcccgctcttgaccttagcactggtcgctgccacatcaccagccagaaccacggttacgccgttgatgcttcgactctaccatcggactggaagccgtacttcatcaacctgaacgaccagagcaacgaaggcatgatccacaagtctcgtcccatcttcagcacccagttccaccccgaggccaagggcggtcctcttgactcatcctacctcttcgatatctacctggactccgtgctgaagtacaagaacagccagactggtctctaccctcagcgtgacagccgccccagccctctgctggtcgacctgcttgccaaggagcgcgtgggtgttcagcccaccattggccagcagaacgtggtagccgctgccgctgcttctgctgccattgccgctgctgcttaagcatgtcaacgtattgcagtaggagttctggtttttgagggttcaattggttgccttgatgaaataattttacttttcgtattttttgttcatagattcatgcatggcatatgaaatcaacagcattaagaccatattttcatgtccaagctctttgtagtcgtatcaatattttcatcatcgctttcgatctctaagttctacttagccactatagataccacatcctcatcagcaaccaaatgtcccaatcctacccgctgcggaacatgtctcgcgctcgctccccacaccaatgcatacttaaatgtgtccttaattgtgcgatggatctggtcacaaacatcctcaatggtggagtcctttcgtacgatgagcgcctcatcgaatttaggttcctctccctttctaaagatacgataatcatcagccatgtcaatgaacctaaagtcaaggatataccataccgttttgtgtaaagccgcattagtctcagttccttccagatgcgttcgacaacgtcttgcacgccgaggtcaagttcgcaactcatgacggctgtgtgaggttcgcgggcaagggcatcaaggaactcgaggccgatgctgtcgaccttgttgtaaacgtaaagactggcacaaaaggagaaatattagcgtttgacagttggatatcaatcatgattagtgtcaatcttaccagcggatgtacttccggtggtccttcataatcacatcgataaagtcgtcgatcgtggctataacggagccgcaattagtgtttgggcctggctgtttgtattaaagcatcacgtaccattctcatctcgcacgagcacctcgcagttgagaattttgtaatcccggagcacgttgtaaaccaacttttcatccaaatgctttgggggcgtagcaaaagagatcttcatgccaccggccttcttgattttcaagtagatattactaggatggtatcagtatttcagtctgcgcaaaacttcggatacggtataacatacgggggctccttgttcaaccgaatgcccacggcatccagctcggcctcgagcaaggctcgctgttcggcacgctttgtggcgtccaaaatcatcaagatcaaatcacttgtctagaagcaggaattttgtcagtgtttctgtactctctcctattaagaaagttagcccgctcacctttgcggccgaaatgacctgccgaccacggcctttgccctcggaggcaccttcgataatacctggcaaatccaagatctgaatctcagcgccaccatactccagcactccgggaatagccgtcagcgtggtgaaagagtaggatgcagcctcactcttggtcttggtgattttagacaggaatgtagactttccgacagaggggaagccaacaagagccactcgtgcatcgccgctcttgctgacatcaaatcccgcaccggggccaccgccagcacctcccactggctccaagagctgggctcttagccgggcaagttttctggaaagattgttagtttatatttgaaattgaagttagagaattcagactataccctttcagtagacccaaatggtgttctgatatggagatttggaaattaggtcatatcctcccctgatcaaaatgatatcttacctgttgccttgttctctgtgggtcattagcggggtgatatataagtctgaagataagaacacttactctgcgttcgacgcatctcatcctcgatcctgtaaaagatcagtaaattaggccatccagcaattaacaagaaactgactccttgatcttttccgtgatgttcaccatcttgtcggttgaggctcgtcgcctgtgaaatcactaaatatttttctctggtgcttcgttgtgcctcagagagggaaataccaaatccgatgtgccctggcgcacttgccaagccttatgtaagcacctcagttggaacggtccaagacgtcgaccttttttttgaagctcaagcttaaccttccaagtcaacatctccaacacaaacacgaccatggcagatacatcggttgctgagccaccagctcccatttccaccacccccgaaacccttgaagtcaatgccgaacagacaattgtggcaacaaccggcgcggacgagactgtgcaaggagagcagcagcttcagtcggtcaagaagaccaagattattcgcaggaagaaacgcccagcgaggatacaagtcgacgcgtcaaccatcaaagctgagcctgcacagcagccgggactcgactataatatttggtacaacaagagcggcgacaacgacgacaaatatggcctcagccagcctgcgcctagtcgctgcaatattgcgcgtgactcgggatacactcgcgctgatcgcattccgggctcctttttctggtaggaaattttaccattgcgcatcgcggtagacatttgctaatcctttttccgtcctatctagcatacattttgcgcgaggcgtctgcgtgaaaggtcaggactgtgaatacctccatcgtctaccgacgattcacgatatgttagtgattcccatgccgtacgcgattcgaggattcttctactctgttggactcgtcggatacaaaagaacctggctaatcaatgattcttaggttcaatccaaacatggactgctttggttagtctccttgctatttgattttaaaacaggcgactgactccagactatagggagagacaagcacagcgattacaaggaagtgagtatctctttgtgactaggagatgttgcttcgctatgaacatatcgctaacgctacttgaaataggatatgtccggagtaggctcgttcacacgccaaaataggacaatctacgtgggtcggattacggtttcgtgagtacctcgaaaggctatacttcgtattgttgctaatcaacatctagcgatgatatcgaggaagtgtgctcaaggcattttgcggaatggggtcaaattgaaagaaccagagtacttaccggacggggcgtggctttcgtgacctattcgtcagaaagtaatgcgcagtttgcgtaagataccccttcccaagctctctatttgtaccgaactaacatatgactaaagtctagctgcgatgcaaaaccaaagcttggatcatgaagtgagttcaacatttcaatccacaagatgtgttatacaaaggtactaacaacaagtaggaaattcttaacgtacgatgggcaacggtcgacccgaacccaatggcacagaagcgcgaggcacgccggttagaagagcaagccgccgaggctgtgcgccgggcactacccgcagcttttgtagcagagatcgaaggccgagatcccgaagccaagaggcggaagaagatcgagggaacttttggactacagggctatgacgttccagatgatgtgtggcatgctagaacccgtcaattggaggatgcgagccgggccgctcagctagaggcaccccaacaaccgatgatgatcgagtctgcttcggtttcggtacaggagcaggagcagcagcctcagagtaatggcatcttctccagctcagctctcgcagccctacggggtcttaatggcggaacggtgacgacccaggcacccaaggctgttggtggaccgttagtcggctacggcagcgacgatgagagtgactgatttacgtgcagtttgtgcggcatcctaatccatcatgattgtgaattttttcatgtacaacagcaacgatacctctgtcaaaatgtttatttctctctgcgtctccatacaggatatccgtaaaatattatttctgggcgtcattcatcatcactatgtatggtatcatcccgagcactcgctaaaacacaacattgagagcgtgtcaaccaaaacgaaatatatccacccataaaccaaatgcaaacaccacgagtctcatcgatccgagacttatgcttaacctaactccccttcactcttcctcccatgagatcaatcagtcgtaaattcatttctcgctagggtcccaggtcatagtatacgcaggagcctgtgcggtagttgtagatgaaagcattcgtgtagctttctatggtatcatttgtgcgactctccatggccaagtcagtgagtagctcatgcacttgactaagatacttccgctctgtcagcggtgcgttctggatcacgctgcgccagctctctgcgtcagagagacgcgtgtcgcgaatagcgtcgagaacttcgtcgcgggtgtcgatggctgcgacagggccgttgcgggcgttttcggctacttctcgagaggaaagaagggctagaacacagtgtatcaattagtatactggactggatccccacttgaagcctgaacatacctgactcaacaatgttccttcggttcgtcttcttgtttcggtgctgggggatgaggatgcgcacatcattggcccgttcctggaacgcgagagcctcctgctggctcaattgacgggactggcggggatcaggagttccctcgcgatactggcgcgcctgcacttctgatcgaagccactgcacaagttcagggaggcggatatcgaattcttccttgcgcatcagattccgaactttaaacccacgctccttgctatcttgcttggcgattacaatgcaccggtgattggagtctttgtattttgctagaagctcttcaagggacgaggcatcgactgcaagctccgcgcttatgttgttggaccagagttcttcgatcagtttaactcctgttgtacggaggactgcggggtcaaagctggcaacaagtacattacactttgaagatcagcaaatattacatcaaacgagttcggatggaagtcacttacccgacgggctgtccagtacaactcagcacttgtctctgaatctttcgacggagccttggcctttaggtaatcaatcatcgatgaccgtagtagatcggagccgaggttgaaaccaacagcatgtgcttgaggtcgatttgataagccatgaggtgagaattcctgaatcaaccggtcatatctgccacctgcagcaaacacgccgcgtcttttgctatcaaagatacactggaacagaatgctaccgcggtagaacttgtcatgaacgctgctgagtgggttgatataaatcttccgtttcacgccgaaactctgcaaataggtcatgagcacgttcaaacgagcgaatattggtgaaatccgctccgcatattcagttccttccatgataatctgaagtctgcgttttgtctccttcaatgagtctgtatcatatccattagcgtattgttcccaatatgagaaagtaagcttaagtacctctgaaatcgaaacgggcaaggtcatccaacgaagttgaagcaacaccaattgccggggcccgaagttcacttcgaatcttttgcatgttatattttccaacattcagcttactgagaacctcctttgccttggggatttgagtaggcgtgacgcgacaaaattccataataagctggagtagatcggagtggttgacgaggaagcacatcggagtagaccgcagaggtgggaattcctcaatgatttcgtccaaaactttgatcacttctgcctcttttaaggctagatccagggtgttgtgggacacaatatcaaagtcaacttcgcggtgagtttgtggttcgccaccatgtattgtatccctgtagactgtgccgaacgcaaatgtcttctctagtgagtgatcttgtcttggaattgctcgtgcgtttggaagtgtgagatcatatggcagctgtaaaagattgccagatgcatccagcacacgtactgcaccgttgttgtaatgctgagatcgaggaaagagcatttgccttgttgactcgacagcaccatgtcttcgaaatatcgaggttagcttcttcttaaccaagccctggacaagtagctcgttcgcggccggtactgcatgtgagtctatgtcccaagcaatatcttcgaatttcttaggcgactgagaaaagatagctgatagaatctttttgtagtcgggtgaatttggatccgagagcagatgcacaatagcccgtctgaatgtctcttcttcgacctgaagaggtatctttccgctggacaaaaggtcggaggctgtggggcgttcactcggatcatggctcagcagagattcgatgatctggccctggagcaacttatcagattgctggaaagcgggcggaagagtgtgattcttttcacgaatttgtcgaagagtttggtctcgttccatgccagttggcaatgaataacacatctcgaagaagattacaccgagcgaaaacatctagaatgcgtgagcaggtagtcgtgatgccagttgtatattcactactcacatcgactttctcattgtagtgccccgaaacaactgacttcatctccggtgccacatagtaggttgtacccaaactacgagtgaaatctccttcgaagtcggcggctgcggacgaacgcacagccgttgtgaattggccacttgttgcaagaccaaagtcaccaatgcggggattgtttgcaacgtcgatgaaaatgttgtcaggcttcaagtcacggtgtatgatgccgtgactatggatatggctcaagccatcgagaatttgccggaagagacgccatgaacgctcgatatcatcgcacaaatcatcctttattagatcgcgcaaggtctagggaatgttagtctagaacaacgagcagagcgatgttaaaacacttacatgtttctcacagtactccatctggatgtagagtgtcgttacgataggcctggcataagagccagatctcgctcggctgagctcaacttcctccacacttccggcatcaaagtcgctatcattttcatttaccctgttcctctctggcgtctctggataagcggggtcagataatgttccttcgttttcatcatcgctgtctgatgcggcaaattctatttttggatatccgctggagctgatgaaatcgaggccgcctgtactgaatccatggtcatggctagcaaacggatcaccttcggtggaggacatagcctcttcctccacgttattgaagtcctcttcaagccaagcagcgtagtatcggacaacatagggatgattcagccgagatagcagcatggtttcggaaagggtgtctttcaacgctgcagccgatgtttgagagatcttctttatcgcatataaccgaccatcgagcttgttccgggctttgactacctgcccaaacccaccacggcctagctggcctgtctcgtcgaagtcttgatgatatcgtgagaaagccggcacgggtccaaaagagtctaaccgtggctgtctctgcatggacacagatcccgatgccctttctcgcatctttaacggcgcatccacgcggaaaaactccgacggttggagctggaaagcagtcggacgctttttgggatttgggcgaaagaattcacaaagcaaatcttgcaggggcggcgagagccccatagacaccatcaactgattggcggaggtgtacctgagaaggacatcctttccaaagcccatctgaagcagcacaattccaagatcccagacatcagtcttcatggagggagcagaaccttcttgtgtcagctctgggggtagccaaagtggtgatttcgacgccgcgaaagaggtttttctgctaagagagtcgggcaaggcttcttcgacgttggactgcagtttaacgatagtttcaccagaaggagtcctgaacaagaagactcggccacaatgaatgttgccatgcacaaagccgctgcggtggtagaactccagagcctcgagtaactgaatcatccagccgcggagcatgtcagcagctacggtgcccacaatatccaggagctcggaaagggaacccttgttggcatactcgaaaagcgcaaagacggtccaagaattatcagatgaatccaagtggtctattgggcggttgattttaaagcccacaaattcaacaagattgggatgtcgcaatcgcttgattccctctaacttgtcctcactagtgcgcatctgctcacggaatgtcaatccttcggaattattctcaacgaggcaaagctccttcaacacaagcagcgggacgtagcatcggctctcagacacaacaggcctgacggtgaaagtctttctgcattgttcgctttgcagaagggtcttgccatagacggcgcggaagaccagcggctgctcatcggtgtcgttgacgaccaacggaggatcaaagcagatggcgccaggtgtattttccactaggtcatcaacataactcatatccacgccgccagatcgactctttcgtctcataagacgagccttgttccgctgtcgcatcttgtcttgaagcatttcctgcaatgcgcgctcttcctcgacagctgcagccttctgtttgcgaagtttctcttgtttttctaggtctgcgcgctgaagagcagccgcctcttgttccatgcgctcctcttcaaggctgggtaggtctttgtcctgtgcctgtgcctgggcaacatcctctagaacatcttggatggacaccgcaagctcgtaaatcatttcactgccgagcagagattttggcttgttgcgtagaatttcttgtatccgggagcgcgctccatcgcgaaagccgtcgaggtttcctggtgagaggttggggattgttttaggatacgtagtggggagttcgaccagcaaaatgaggagtacgtctggattcgaagaggagcgcaaatgaagcttgaatgtcacatcggaggattgctagagtgtatgggttagtgaccacgaggggcccaaacagctcaaagagacacccacctgccaggccgaccgcctattttctacttcttcaaagtcgtcgccatagattgagcgcagagcttccacctctgtctggtggatttctcggtaattggttgtaaatacgggggacgtcacggaggaatcagacgtttggtttttctggcgggagggcttcttcctctgtttgggagacatcgcggggcgtggcgagagctcgccctacaagcgaccctgagcgtcgtgcgacatgagggctagtaataaaagatgaaagggttatgggaggttgaaagaaatcgggcagtcttttttccctcgcctcttgaggctagaccaaacaggcggtcagataatacgcccttccacttctggggtggagatgcttagtataaatgacgacccagttggtttaactgtggatttatgggtttaccgcttgtattctactgtggtttaatttcgtctcatgcttcttgcgtcttgtgtttatttcaagtcgtttacgagatagcccatgtgtctatcgacttgtctatcatcgccgtcaagccaaatcaccagtccctgcccaatagtgggcccagatatcttgagataatgagctggtgagccggtgagctggcatactgagaagggtggcaattatcgaccctgcagtcgatcatctctactagtgttgtctttgttcctgtgactatccacaatcgaagacatcgagcaacaagctgctagccacagcaatcattggtgcgtatccgcaatgattccactatccttggccctaggtccaacacacagacccatctgcaaatgcgacgctgctagcggcaatcaggatccagcccaggttgagggcgccgaaatacgaagccacatatatggcagccccatgaagatgtctcggactccatagattgacattagactgtcgggcctctgcttgtccaccactctgtacagagttaggtggccggaactggaagaaagtgagagcatgttctggacgtaggatggcgttgacaccgaatccgacaaatgtggttgcaattgcgcgggcaatcaagcggagaacaaccaaacgggaaagaaagatattgtcatgccaagccagtcttatgtctgacgtttgcgtagtgtctgcagtggcttgcagctttcaaggacttgagcgccgtaagggatcacagtgtagtcttcgaagtcatgggaaagacaagaattcgggggatttcttatataagacctgaagatagcatagatatttgtaagatgctctgagaacaatcagaccccgaagaggaagaattgatctaagcaaggctggtacatagttgtagactccagatatgccaagtaccccaggagggtacatatggatgtccactcctctgtacacgcacatgtgtactctgtacacacctgttatgaacaactcaaggcccacaagcgaattcttctcggaataaatgtggaacaaaagaaggtgaagaacttctcccaaatcccaatcctcaaaagtccaaaaccgagtgccaagcgtaaacaaaaggaacacgagcttatcgataagctttttccgaccgcgccgaccataaacatccattagactttcgattgggcttgaacttcgaggtttcttccaatcccggcagtcaaaatgctggactggatcaaggggaacgatcaaagcacacaggctacaggtgtggtgattacgttgacctttgaagccattgctctaacgtgatgctacagatgactctaagctgctagaaccccctgagactccaggccatgtctttgccattcgtgcgttcaagagtgctctgtttggcacccccggagcagaggacgatggaaaaaacgcgtccccgagacagtccggtcaccaacgaagcaaaagcgatacgacaacatccgcgccaactgagatcaagaccgacgcgaaatcaggcgacgcgacttacaaccccacgggatccccgacgaaaagcatacttgttacacccggaaccgcgttgcgtcgtaagacggtatcctttggcgaaagtgtcatcgacaatgaggggaaacgccccggctcggccagtaagccggccaagactccaccaaatccttccggagccctcagtacccagtggatgtctgggtcatcagatggaaacggcaagccgaggagcaaactcacccagacactcatgaatgcacgcgacaacgcatccaagaactccgatccggccaagtctgatgagaacacacgggaaacgaaacatgccgtgggctctggctccaaggatacgctcgatgaagatgtcactatcaatctggatgacccccactcagagtcaggcaagtactggaaaaccgaattcgataattatcgtgtgaaaaccaatcgagagattaagaaattgattcattaccgatcgattgccaaatcctacgctcgcaaaaaggatacagaagctatgcggctggccgacaagctcaaggaggaagaagaaaaggtcgccgagatggaaaggcaggtgtcacggcttgcttcttcgatggtcggggagggatcgacaggcgacaaggagcaactagttcaagatttgaccaaacaaaccgctcttgcattgcaatataagcagcaggttacctcgttgcgcagtgccttggaacgacatgatgttgtaagcgatgcggcaaatatcacacaaaagaaaaaggaagaacctccttcaaacaccccaactgaggagcttcgcaaaacacaacaagaattggaacaagccaatgccaagattgaggagatgaaaaaacaacagtccgaactaagcaaacttcaagacctcgcgcagagctcagaaaagaaagcccaagcactcgagaaagagaatgacactctgaaacaaacactggcgcgagtgaagcaggaaatgtctcgatatgaaggtcgacgaaaggacaaggaaacaagactgaagcagagagaagccagactggagcagcggatccaagaatatagagagaagctcaaaacagtctctcaggagcaccgtgcctcggaagagaatttgaggaatacttccgaagcagaacgccgtcacatgcagaaacagatcgaccttctgaagctgcgactcggttctaccgaacgcttcccggcactaccttccacagagcggcaattcctaagtcctcgcaaagacaacacagacgtgcaggcgtttgactttgactttggcgaccaggacattactgatcaggaccttgagaaacctgaagaagaacccaccgaagataccgagcctcccccaagcccgagtccacgctccaaaatacgcgaatcgcgacctgctctgcgcagtaacacactgggcacacttagtacaagaccgaatacccgagacatagtcgcagatgacgacgaggtgacacattatctgaacgaaatactcctgaagccgcaactcgaggcccgtactgcagcgttggatcaaatccccccgtcctcgcctcccgatatctcagccctgaagtcgttgaaccgcacgtactcaagacgccgactcggcgaaggccagcggctctatcggaatccgaacctgaacctgaacccccctgctgacgatgatactcggctcagcaaccgacacacacaacgcgaacgtacccacatcaaatcgaccctcgattcaatctctggtctcccgtctcgcagtcggtattcggggtatgccgtttcagcgggcgagcgcgtgggcaagcggtacgggtttactgatgtccagcgtgaagcgctcactcctgaacgaattgccgcggccaagtcacggctcaggcagaaggacagtcgtaagatcaaagcatttggaaaggagaatctttgaggtgactatgtactatggagtcgcctgatttggaaataaggcatagcttagcattatggggtggtgttcgggttcataagcgttactgtttttcgtcaccttgtttctatctacgttttcagcgaagacaattgttgtattattgaatcggtggctcttctagtctctcgatcgggatcgctcgcaggcactgttgccaaattctcgctgcctccgggattggtacaatggctaatgtatcatatcacacctttattcaaaatctagattaggtattatcttgtctacatccagctgtgctctttcactatctagttcacctacaaaggttccatatcgtatattcacccagtgtgcaacggaaagaacacggtcggtcgtgtagtgcgctctcaggccttaccgtcagagagcgacacgacggcccatttcccgccccaggcccacttacgagactcagcgccgccgcctcccggcagtgcgcggagcttctcgtcctcgccagcggggagaccgacaacgggatcagccttgcaagtgcggaaggctagaacacggatccccgacttagggccaagcgggccgatagcttctgtgaaaggagtggtgggatcccattgggcctggatattgttagcaagaaacacaaagcgaaagaaagaaagcaaagaacactggacttacatcattgaccaactttcggtagttcaggtcgcccttgaacaagacaagctcgctttccttcagatcttcgaacagctccggtgccacgaatggcatgcgccagtaaccaccctgggtggtccagaaagcgtgcggacgcaggatcagcttaccatcctggtggaactggctccactgctcgaagaggaatcgcacgtcggagacctccttgtcagaaagaggggggaatgtcttgcccgagccatcgatcgctgtgtaaaaggcctgcgggtcgaccatgcagttgagcagatcggagaaatccttcggggtgacgtctgacacaaaccatggcaggcgcttggggtggagcacgacactggtcgccagtccggcggacagcaagtatccagcgagaatgagatcaacgaataactcaaatccggagttatctaagacgatgtcaacgcggcggtcgccgtccttcttctctctccgcgccttttgcattaccccgaaagcagcatcaaggtcattgacaatgatgttctgctctgatgctttgcgcgcctcagacccctgcagtttctggatatcctcgtaggtgagagatgtcagaagtgacagatcggtggcattgccccataagcagatctcgcacatctccgagaagagcagcttctcggccgagtcgatttcctctggcgacttgttctctcttgcttttccagactcggattctgtcgccaactcacggtatctcgcagcgagttctagtacggcgggccgggacgacttgaatgtatccatcttctggcgggcgaacacgtcatagcccttccaatgcttagacaacgcgaaaagggcctccatgcggcggtctatgatggtcgttggtcagtattgccgaaatatatctattctctgttggaccggggttgggcttacagaggtaacactctgcataaagccaggccacatcgtgccagtgggggtttccacgctcctccagctccttgttatacgaagcgatatctggatgtccgtcgtcatccaggggactagccgcaatagacacgttaggtgaagctcttatatttctagcattgaggataaaatgactcacgtgagttgtcggtcgtgctgaagctcatacttcaaggaggccaatttggcgataatgcccttgccttcatttgccttctcgccgtccttgacagctacaacggtgcgatgaaggtcatcgatagcgccagtctagagtcgtcacacatattcagcaattgatccggttatcgattgtctgccaagctcacgatgatgacaggccaccgctcgttggccgagaccgaggcaaagctcgacttgtcggaggtgaggtactgagctgctcgggttagtctaatatatttatggccgaccaaggatacttacgagtcttaggatcgaattccatgactgctatgcaagatgtatctagaccgagggcaaaaagtcaaagtggcagaatcgaggggagggcgcggggtaaaagcggtgtacaatatacagttggcgacgtcagagctactcggagctactggaatacatcattgcgcataaatacattgggaacatcaattctaggtagatctcgtaggcaacgccgcgcttgaaaatcagatatgccatcacattcccgaaagaatagagttattcgcgtacgcctaagacagttagctggggaacttgattagatgtttaggtcatggtcttaccatcggcttgatatcggggtgtggcgatgccccaaagacttcatatgcaagtttgagttcagggccgatgttgatgtaagcgcccttattttcagtcgcgtcgcagtatctgggagcggagaagacggtgatgcaacgaccatcgtgttcaacgtcgtaaccgcccatccgcacctcgtgggagcgaatgatagcgtccaggccattgttttcacagaagcgcttggtcacatcagggccaaattgaagaccgacgccacgcttgctggggccgcggccaacctcgggctgcgggtcggtccagagcatctccatcatcaggcccgcttggccaggctgtcgttggttatggcggttgagcttgcggatatcatctaacttgatcttgtcgtcggagaagagaccgccgtgcaggacaaggtacttctcgccgatcaaagtggccagcggcagagccgagaatgactcggagaataccttgaagacccgctcgttatatttagccttgcactcgccttcgaagccgtagaccttattcatatcatccgtctcgtggtttccacggttaaggaagagaccgttaggacgcaaccacttgtatgcataaagcagcagagcgacttcgcaggaccaggagccacggtcaacaaagtcaccgttgaagaggtaggcgtgggtatcggagggggcaccatttagtcggaagatattgagcaaatcgaagaattggcctaaacaatcagcaactgcttcactcaccagcaagacaatacataccgtgtgtatcaccgcagactgtcaacttcttgcccgattccaccccaatttcgaccatcgtaggctcgttgtatacgatatccttgacagccttgatgatctggaagacatatttgcgatgaatattctttccgtccttaaagcgctggaccatatcatcgaggaactcctgcgtcatttcctcgccaaggcgcacaccatcataaccgtcctcaacattgatagcatcgatatccaaatccgcaaaagccgaaggcggatctgagatctcaatggcccgctcaaactctctgcggcgcacgagcttctcacactcagcagccttcagcttagcattctggttggccggttcgcgtctcaccacagccttgaaatccttcaaggcctccttgtaacttagaatggcggtattggcgagagcacgtctccagtaggcctgtggtaaatttggatttagcatatatcgccgcgaccgctcaatatgcaggcacaagttgtctctcttgccggctaagaatgccgactaaccttcacatagttgggatccaattcgattgccttggtggcgtcggcgatagcaaaaccgaaggcttcgagcttaatctgagcctataacagcaagaagaaaagacattagctatgccgatcctaacgagtgtgcacgcgactctcgggaatagatcgtcaggaacatacctgggcccggttggagaagaaagaaggatccttgtcgaatttggcaatagcctgggtataaaagtcgacagcgacaggccagtcatgctcagcaaaggccttgttgccctgcaccttaagcgcagtggccaattcttgatcggtagccatttggggcggagataaaaagcgaggggcacgagacaaggattatcggtgcgaaacaagggcgcggaggaaagaaggcaacgattatacgagccggaagagaaagaaagagaagccagaaataaataaaactcctctaaatccagtatagactaagagaaaaacgaaaaaaagacgagagagtggtcaaaaggaaaaaataaaaaagtgagagaagagaggagaggcttgttcctgcttctgcaatgttcttttttccccgatcgcaacgggccttggcatcgatccagacttgacggccacctcccatccatagctttctctctctcctcacaccctcagatctcctccatatgtctttctacgcccctccaaaccagcagcgcacgctgcgcgcatgcatggtctgctctgtcgttcaagtccacaatgtaagagctacacgatctccgttccgcgggcaactctaacgacccccggttcctctagaaattcatgcgtgaaggctgcccgaattgcgagagcaccctccaactccgggggaacaatgatgctatccaagaatgcacgtcgcaggtcttcgagggcctgattgctgtgagggatccggctgcgagctgggttgctcgttggcagcggttggataactacgtgccgggcacatatgcgaccaaggttacggggacagtaagtgcattctttgaattcctaagctctgttattcctcttatcaagcacgggttggctaattgtgtctttcgcgttgacagcttcccgaatacattatcaacagtctagaggactctggtattaaatatgtcccgtacgtgttcgaaatcattccactatctgagataccgtcgtcgtgatactaacggtcgcttgttccagtcgagacggaagcactggcgaagaagatgcatgaagcacctactctcaagtctttaacgctacacgaacccacccttgtccatacagtcttggtttcggataccctagcgcacacccattgattcaatcaagacatgctatatgagggtggtttcgacaattttgctggtcgttcggagtttcggggaagcattaccttctttcttcatatttattggactgcaagggcgtacacagcagattcagattacttaggagtttacaattccagtttctttagctgggggcataagataagaaaacggcttgcagagtatatatccctactctggccaatgattcggttgagtcataactcaatggtggacaagcacaatttccaggaatatacgttgcatttttgtaatgacatgaaagtcgtggcagcaagggaaaaaagtgaaccctgcaggacataaaagaaaacagaaaaaaacgctcattaagccaaattgaaaacgcccggacacttctaaaggtcattgccggcatttgtttagatgttctggacgatctgctcgatcttctcaaggaggatatcggctgtagtaaacatattagtaaagagctcttaagcacaagaaagaaggttaacataccgtggtgcttctggaagaccagcatgggacgcagacggatagcagagggaccacagccaccgacgttgacaccgaaggacttggccttggcagtgaactggtcgcgcttgggggtgtcccaggcgatgaaggtaccgtggtccttaccacggaggttctggaagtgctcggggtacttctgggccagaccggcgagaccggcgtagaggtagtcaccggtggtgcgggtgttctcgacgaggtcgagacgctcgatctcctggatgattccgcggaagatcagggcgcgggctgggtcgcccatccaggtgttgaattggcggtagggcttgttggggcgcagggcggggttgccgtagtagtagccggcggtctgggccttcttggagaaggtgaccatgtccgggggagaggtcaggttccagtggtcgtgggcccagaacttaccggtggcaccgacaccggtctgcacctcgtcgacgatgaagaggacgttggtgcgcttggtgatgtcgcggagaccctggaagaaggcgggcgaggcgtggttgtcaccaccctcggactggatgggctcgaccacgacggcggcgacggggttgtggaactccttgatgagacgctcgacctcggccaagcagcgctgctcctcggcggtgttctcctggacgtgctcctccagagggtacttcagctgggggaagggggcctggggccagtcaaaggcggggatgtcaagcttgtggatgggcttgctgcgggtggtggacagggagccgaagagacggccgtggaaggcagacttgaaggagagaatggacaggtggggagaaccagggctctggttgttcatggtggagagcagctcatcgttggagaagtcggcgccgacgccaccacgctgcatctggcggtagtacatgaaggcggccttgtaggcagtctcgttggcatcggaaccagccatggcggtgaagacctggttcaggcccttgggggcagcacggaggactccggtcttgagaatctcagcccagtcggaggaggggaagttacccagagcagggcggttaatcaaagcgcaggccatctcgggcgaggcggccacctgcttgaggtgggggttgttgtatccaacgggaatagaagcaatctgagcatacctactggggtcagttcctgtattccaattggctcgtggctagtgacttacacatcaaggagcttgtttccatcgagatcggcgatgctagaggcggggttagtcgagtcttgatagtgggttagggtctatcatactagttaccaacggactggtagtagtcggccaacatgttcaagctgcggacatcaaagacctcgtcgagctcggcggcggcggccttgttcttaggtccggggagtgaccccgagacggagggtgcggagggctcattggggaagaaaggcttctctgcacgcagactggcagtggtagagagagcgcgagctgccgggaggcgagctgcagagcgcagccgtgtgctggcacggaagaccgaggacattgtgaatgtgatgtgaagaggggtggtggggaggatagatgaagggtggagagagaatagcggtctagtaagctatccaatggagggaaaaggacccagatcaatcaatctactcgggcaagggcaagggaaggaggacggatgaaatagaatggaacagcaaccggcgcagggtggctttataccagatgcagttggagtatgctatcggtcttatcctggagctcagtagcttgtccccgcgtatgttgcttttttttcggtgatattgaccaatcgggtgcttgatctcgacaacgaaacgccgagcatccgatggggtatctggacgaattgagaaagtctacgctggtgggttcttgtcaaatctatatggtaagagtttccatataaacgtcccgaggggggctattgtgcatgtatttatctcaatggggacgagtcacgcacaacggcgaaagaaagaagtcgaggccgtcatgttgctactgtcgatcatcccagggttccgggcctctgcgataagctaatttgagtcttggcatctttttttagctgcgtgtatgagcatcgatgtatgatgtcttgactatatcatggttggcttcacaatttatagcacgtgtttaataatggattcgttgtttaattggtaacgcattggtcttgtttagaccgggacatccggtggatgtatccagacgatcctagtaaatatgcaatattaagttacacttgcatttatgtaaacgggaaatagaacagatgagccctaataagctgaacatcggcgaccttaggtcctttggctgataacgcactatttcacccaaaccaccaatcaactgggcttgtggtttagtggtataatactcccttagcatgggagtgtccggggttcgattccccgcgagtccagatctttttgttgccttgacaatgaggtcaattaggagtgcaataactagactatgtcgttggtgatatattttttgttttgggtgcgtcatggcttgacgtcacgctgagcatatatatcttttttccgtggttgggttttgtaggtaaattgtaggttgagacctatgtaaggactatatatatctttggcccgaaatggcaagaagacaacgccggaacctcattttaccccaacacctgggatagtctacagagacaattgatgccgttacatagtgaatccctcatacatagtaatatatatacaccacacatgagtacctacaacctagtcaacgaagaaaaccaagagcgcaccacgcgccgatcctgatccacccaatccagcaaagttcgaactagcgcaggactgtgctttcagcgcacggtcaaaccttgggtcgagggtgatcattgcttggaaaacgtgtagatctacaccgagtatctatactactataggaagcaattattgggctggttaagtaatcattagaatcatgatagtatcaaatagatgtagtacaagtaatatcgttatttgtgtgaagtaccccttctagcacaataaaatcatctaggctaaagtgacataaattttgatacaaaaaaagaaaagaaggaaggcgatgtactaaaacagcagttaacgcagctgccgaccatcgaatgtctcgctccgtcctgacgcagaggaggaggcagcactcgtcggagaggcatagaccatgccgctcttcatctcaatgctatccgcaggggtgacggcgcggccggtatcggatgtgatatcataaccgtggcccatcttctcgtggctcgggagtcgggactcaacccagctctccatctcgacggtgcggatgatttcgaatcggtcgctgctgtaactgggttggtggtggccgtcggcgacgagacgggatgctcgggagcgggcggttgagtaccagtgtctgtgggtgcgagaccgctggttgtaggaggtggtgttgtggttggagctgaggaggcgggggaggaaggctgcaatgagggggcggagtgctggggctgaagagcagatctggtgattgttagcgttgagtatgagcatgggtagcgcgactttggtcttaccaatcccaggctgatttctactgccgcggcgatcagcactggccatccaagccaggtcgcgtcgtagccagtcaccatactcttccacacgtatacggttcgcacggagccggctacgttaactatggagccgagggcgaagatggagataacggcgagtcgttggcgagcagggagtttcagactccagatcaacggcattggtaaagccgtgactaggaaatcggtgaagatgttgataacactggcggagaaaacaatcgcgccgtcattcatgcaatggtatgactcggtagggttaagttgccagtatgcgcggataggtctgtatgaaacattagcaacgattctcgatcaccacgacagcagacgacgcacgagcattggaagatactgataatagtgaacagcaaactcgccacgccaacaaagacaatggcgaaaataaacgccaagttatacagcgcaaagtggcccttcccgatgagtcgtcgacagaaccacaacagagagatcttggtgaagcacgacgacatcgagaacatgatttggaaggagagatttagtttctgaatagcttcgagctccagcaatttaatatcccagatatggcggttcatgtcccaatgttccgtggcgatagaagtgacgatggccattgcgatcccgaagaccagaccgatgacaatgagtgcatcatcgatgccggcgctgcatgtgatccataccctggtgtatagacggagggagacgaccagggaggccagggtgagacagacgacgttcacgatgaggacgccgtggccgcgcgtgggcgggtcgatatagtttggggtgggccatgagtccaggatggcagctggagggagcttcataatcgtatcggtgcaaggaagacgaagaataaaagattgggacaacaaactgcagcagaagatagataggtaacgaacgtgtctagacagatgccattgccataacccaagcccgcgatgaatgggaatgtcgatcaaaaagaaagagagtcagagcagaccgagggtacaagtgagccagctccgggtaaattgcgtctgttgaggaaaaataaagaaaaggtataccccaccgggggggacatggacatggggtactagaccgcagatataatacagggctaggccagacctttcgtccaatacagagctatacaccaagcgaccagagagacacacccacgaggcatagagtttaccccaagaacacaccatctcaaaaaggcgtcagtgctgaagcatcagggctatgttgtacatctccgtcgccaaaaagccgttccacgccatgtccaaaatggcaacacggccgaaggttgagtggaatggacaatgatagcagatccaatgtccccatagttccatcgtcggccccactgagcctttggatctggatctgaggcttgtgagaggttgagatggtgaggtggcatcgcgtgtgagagagacccctggctcgcttcacggaagaccacggactcccaaggctgtcgacttcgcttaaataatatattctggctctcacgtcaaatcacagtgcaatagggggaaagttaattgcattggctcgtaacaaagtgttaaaatctgcccctacggaggccgatgcgtggtggtccctgctccggaggggccgatgggttgtatgtaactcgttatatgaggtaggaggttcgttataatttagacaattgaatagatcataaccaaagaatatcaagtagaataagagggtagtatataactagatgtaactttactacttcacaactgtaacgttcagctcatcttatgatgcggggtcactcttccaaggttgtctccactctgacaatgcatctctcacgtaatatatctggcacgtgtaaaacaatgggctgagacaacgcctttgcccgctattttctgcacgctttaccgtctatgatttacaggaaaacaatcaatgactcttacatatcattcctactatatgggtatcattcaaacaaaaagagaaaagacaaaaaaatacaaacaaagacaaaacctcacgatcccatggacgcaagtcgaagtttcaattgattctcgaccaatctctgttcttcaagcgtcaatctgtcctcggggtcgatttcatcgacacaaagtttgatcttgaggatggactcggcgcattcagccttcagtctccccatcatctcgggatcggtcgcgaacgcagtttcatcaatcccgcctttgtggagactctcttcccagggaaccagataccgttctaaggccttagagcccatgcgagcaacgtgctcatcatcgagaagccggccggcaagctgactcttgaaaatcgtcttgttgtagatcttctcctcaacggtgccaccagccaccattcggtacacaaaaactttcttcttctgaccaatgcggtaggcgcgtccgattgcctgctgttcccaggtagggttgaactggaaatcgaaaatgacaacgcggttcgcggcctggatgttcaagccaacgccaccggatttggtggagatgagaaagacgtaggtcgagggatcgttgttgaagctccgaactacctcgggacgcttcgctggagatatattgccgtggaggagagaatacttgatctgtgttctgtccattatttcccccagatacttcagtgttggaatactggaagaaaagactaggatcttgtccccgacagagattgcctgcttgactatctcattgaggatcatcactcggctggataggctcggttctagcaagttaggagcctccttgaacacatcatccagctcagataacattgacctgggaatgatttgctcttcgacaggaatggtagatgcgagattagatgcgaggttaggccccggattaggtgcgagattaggcccgagattattacccgggtcatcaccgctaggacttttctgtttaccggatgcatatttggtcttccgggattccaattccgccttgaaaagggccgggtgattacaacaaagcttgagaagaggcagccaagacataagctccgagcggacacccgcttcattcctcagtgctacacctttgataaagatgttgtacacagctttttgaatgctggtcggctcgaagtaaacagagaattcgaactttggcggcaggtcatttatcagtgaggacatgtccgctcgctgtaccttggggttgatgatgcgaaggaacagctcctggcgctggagtgcctctcttcggtcaaacttgctactttcaatctgcgagccattttcgatgggcttgatgaattgatcattgaaatcagcaaagtctcccaggtactgaggggcaacccaatcaaccatccaatagtaatcttccaaaccgttggatatcggagtgccagtgagcgcaatccgtttccgagtgcgcaagcgggaggttgcctcggcaagctggctttcatggttgcgtaaattctgagcttcgtcgaccacaacgagagttgggctgttcaacacccagtttctgacatttttgttgaccgatggttgtccctgctcctcgttcatttctgcattgtcctccttcacgagaatgcggaagatgttatagctgagaatcagtataccaccctcctcattccacgcgcgaatctcttcgttccggtcaaggagctggttttttgtcggaatggctcgaatcttgccaagatggtggttctcgggggaccacattgcaaactcatcgcaccaattttggattagcgatgctgggcacagtagcagggttttggattgtcgcaattctctaggaatttggtcacgaatggccgggaattgtgatgccccggcagcggaaattgtgacaagaagggatatactaggcaaaaagggttaactgggtcccaatgaatgggacaatatcgcatcgcaatcatcactcacacttgcatcgtcttgcctaaccccatagtgtgggctagcaaacacccttcttgtcttttgttctcaataacctctcggaacataaactgaattccagagagctggtaggatttgacatattgcgcgatataggggtccaggcatatcatgggaagtcggaacgaaaccggccttggaatattttccttagaagcattcccttgggcaaaccgagacgcaagcactcttttagcctcggcttgtttgtctatccgttcttggccttctttctgggcccgagacaaagtgattttggggttggccaatttccgcttgccgttgcgccgaatggatgggttcatttcgtcgggttggacatgagaggacacgtccatccatcttctgcatctccagagaagatcgttcaaacacccaaagaattgcgcgaattggtcttcatcgctgtcctctccgaccgccataagcgtagccttgacttcttttactgtaaaggcgccacaggggacttggataacgttgacccacgacacaaacaaggcggccattaacattgcagaatggctctcctcggcatccattccctcgatcaccgatgaatcgtcaaacatgtgttttagtgcatctcgcatatgttctcgatatacacagagcatgtaagacctgagatatttagaaagttggttgaaccgattcttcggcagacctatgagtgctttcgctacaagatgacgtcggtttccactttcttcgatagctgcccacagcataggcgagacatcgtcaaaaatactcacagcgtcgtcagtttcactgccgttgtcactgccgttgtcactcgtcaagtccacgaacctagtgttgaggcgcttcgggatgataggaaaagtttgtgcatctacctgaccctccgctttaccctcattcgagggcaaagttgtcatcggtatcagtggtgaagctggactatatctgtggacgctatctgtcttcaggcggcgcctcttggcgaccgggggctcgtaattctcttctttgtagaaaagatggctgagatcctcgtctgaagaggagtcacggaacggtccatctcgataagctgtgcgataacgtggctcttcgtgatccggtgcagcctcgttctgttcgagatcggaaacaagggcgtcttccgattgctctgatccgccttccgattctgatctatcttccgattgttctgatgattcatcttccatctcatcaccagtgtcgtgcacgaaatccgactctgaactgagagtttcttccccgtccaaatttacattgggcttttctggccgcggggtgcgtggcggacgagcaacttttggcggcgggctagtttgctccagaacggatagcttccattgatccaagaaaatatcgatcacagtgggatcgaggcatgcacatgcttgaagtaaggacgagcgggatgaatgttgcgcctctgcgagtgctttgcggagggcttgagaacgtttctccaggtgggcgagccgtgtcgagatttgacttttcatgcccgggagcctttggcccctggtccagatttgaaatgctttcggcagctctttcggcaaccgaatgtcgatgaactggctcttccgtgtatcaatgtattcatcgacgattttattaaactcagtatcttccaggttcccagaagtatccggagaggattgctcctcatcctcttccatttcctcgcgagtctctgtatcatattcggcctcggagctagaatctccaagaagtgggaggatatccgaatcgtttggggggtaagtcttagcaagataatcaagaaagtccttgtgcccaaacccggagttcggagcaggttcattgggagtgagggtgtccgggagagaaggtgtgggtgggcgttcgatgacggtggtctccatccggcgaggtttctttttcgctgtttggggtagtgagagaccatcaaggacaggagcggagctgatgagatcatcagagagggtaaggtcgatgtgatcattaataaggggggtggtattcacgggatcatcgaggccttttggagaaagttgtccattggggaatgctttaggaggaggctgcggttgctccaactgataaaactttggcgatcgtgcctgtagccatttactggctctcagaatatactggcactgcgagataattcttatgccaaggtctctcacctgccattctgtgatatagagcaaagctgagccggtgactagatgttctcggagggaattctcgagagccataagatctgggcaagccagattataagaccaatccccggccctttcatgacaaaagaatgtaacaacctcatccaccgtccagtggaaagggtctttggtcaaagtcatgtttgctttaggggggccctgtactagatcagcgggctgcggtccagacgaaccagtgcatttgtcccaatgacgcgacttgacaagggtcaagtttggaaagatccatcacttaccattttaaggcccccaatgcaaattaaaaatgaagtcagtgcaaaccgaaggatgtaaaagccgacaatgaagcattgagctgatgatatgtcaaagcgaagtgaacgaggagctttcaaagaaagagagccgggtatacgataggggagaagagaagagaagagaagaaagaaagaaaacaaaacaaagcgaaggaatatcaatcaaaagaaaacacgccaccctctttcttcccaatctctgttacgcgcgaagctctttttttgtgccggtgtttgaataggcggtgagacattttaagggcaattattccgaaaaaggaaggcgggggactcgggcggtcgagtctagatttctgcctcaggtgtcggccaaatgccccgccaattacaaatccccaagaaccttgggggagcctcggcgaggttggaatctttgaacaatctacgcaacttgagaaggtcgtggagtgccggagtaaatcaattcctattcactagcaatatggcagaatcaatttattcaaactatccgccagatctgtctccagctcaacaaaagtttcttgtcacatctgtgaaagactgggctattcaaaatggtctcgctgttcgaccatccccagcaattgtcccagctggcctagatccaaatggggtgctggctacaaatgcaccggtgacattgtttcccagtccgtttcctcggacttgcttcgaggaagccactgctctccaagagatctacaacaaactttatgctacgatcacatgcaatgaagaatggctgggaaagattgtggaagagtaaggatatttctgctctagtatggtagatgttcattattgaccattttcaggctcattgaagttgatgactttgttttgaacttgtggaaagttcatcaggatgtgaagaaggaaggatatgttcaagacctgtcactgggcctcttccggtccgattacatggcccatgttctgcctacaggtgccacggctctaaagcaggttgaatttaacacgatctcgtcatcgtttggagggctttcagctcttgtgcgaaaaatgcacaccgagcttctttcctcgccgccgggttcctcaatcaactatccaccccaccctctgctacaatccgaggttccaccggagaacaccgcagtggaaaccctctcagcaggtttggcggcagcccacgaggcctacggggtgtccaagtccaccccggccctacctctttgtgttctctttatagtccaggagtcagagcggaacgtttttgatcagcatgcactctcaacacagctcaagaaagttcacaacatcccagtcttccgtgtggctagcgtcgatatcttggatcagacatccattcccagctccaactccgcacgaccattgttataccagcctcctcactcacccgactcaaccttcgaggtaacaactgtttatcttcgaggttactatgcaccagacgagtacaaatccaaccgtgactggctggcccgaactcacctggagcgctcggcggcgatcaagtgcccttccgtgctcaatcagctgtctggctgcaagaaagttcagcaggtcttagcagagccgaaagggccagatcatctcgcaagcttcttgaagggggttgacactacgctcattgaaagagttcgagatacctttgctccgcaatatgacctgtcagttgacagccagggccgcgatctagccctcaacccagataccgccatgaaccatgtgctcaaaccacagcgtgaagggggtggcaacaatatctacaaatccgatattccaacctttttgcgatctattccggaatctgattggagaggctgggtacttatggaactcatcaaccctgcagccaatgcccaaaatgttgctctacggaatgacggcgaggtccttcgaggacatgtcatctctgagcttggtatttatggtaccattctttgggaaagtactgggaagattttgcacaatcaacaaggcgggtatctgttgaggaccaaggggaaggaggtgaatgagggtggcgtagccgcaggattctccagcttggacagtgctattttgttctagataacttagactagatctgacatttacaatatcaacggttcattcatacttcagctttctggcatttcgtgtaagataatatctacgacagcatgagtctcataacgtcattctggagcagatgcacagcttctaaatcgcgtagaagggagaaaaagtatatatggagggctaaatgccgagacaactctatgcaaagatgggtaaacccacacaaagcaatatgagagattcttctttggccatatttccctgcagcaatcaattctacaatttcgaccgacaggcctcaagaccagatggtccatcgtagatctgtttctctaccagtcgagtgtttatctggacaacatattggttagttcacgtgtagatcaagaccccaaactgagaagccggggtacgtacgtgctgtttcccgagttcattaacattctgcacgccgagaagtcgcatacatgtcttggtctcctcagtcaagactaagatctgtcagtaagtcactctacaaaaaaaaaacgccgagtttcgctgatcatactttccagtgttcttctgacgccgtccggccccccggccgccaaaccccaaagcggagctcttcctagcccaacaccatgagcacccaaacaaagagccttgaccacatcagttcctctccggatcccgccatcgacccacacttcgatcttgtcgaagacctcggggcagtatttccggatttcgagtagggtgtggacagcaggaggagccgtgtcaagagaccgaccaccgtggtttgaaaggataattcctttgacctggggcgtatgttgcgtggcaatatacgcgtcttcgtgtgtctgaatgcccttgagaacaaccggaagatcagtgtgctttgccaaccagccgagggtctctctccatgtaagcgaagggtccattcccttgaatacggggtctccagactgggtgggtggcgcgccctcattgttgtcaccctggaatggagcctcggaagcgatgacgtttccgctgcgctcgtcgtcctctcttttcccagtcacgggggaatccagtgtcagggtcacgaatttgattgcactcaacttgttgattcgagccagcatacgttcgctcttggttcggtcgttctgcacatacagttgccagccaaagacttggcccggggcggcgcctgcgacgatctgctcgggcgtcatcgacgcgctgttggaaatgatctgcattgcaccgaagctgcgacatgcttctgcgattcctgcttcaccagtggggtgccctaggcgggccatagccgctggggaaacataaattgggagagacacgggatttcctagcaattttgtcttcaagtcgcattgtgtacagtcgatgaagacctttggccgcaattggatggagcggtagacttcgttgtttttgcgcttgctgatcttgtcgtcggatgccgaataataataggcccatgcctttttattcactattttcgtggcggcatcttcgatctcatccagattgagcaacgtttcgagcgcctttcgttccattttccctatgccgtctgatcccacaaagtaggaaaagggaaaagccgaggcgggaaaaacaggggtgcatacgcgccggatactttttcctttctgggattagtgccgtcgccaacggagaattaatatgcgaaggaacgacatgcgagggatgggaagtactacaaagtactatcaagtaagaaatatggaacaatatacaatacaaccgtgggctataggccttttgaacaagtagaatcaataaaccaccgattttagctctaggtaaccttctggccgagacaccggaacacttggcatttgttatgacgatgaatagtacccctgtttcaaattttaactttgtattctttttcgttggtatcattttgtatgtttttctatagtatgcattgtctactgtctacgcctgtctacaggcttgacgtacaattaagcgcttgaatgcatactccataatctgcagcacgagccctaagcccactcatgatctggacgattcgcgaccaaatcccctcttattccccatgaaatctgcttagaccaatagaaacacaatacaaaattctcctggagggctaaaattaaacatgcggacgtgtccgtcgactccaccatagtctagattcccgttgaaacgctgctgtcaagcgaataggttgcccgtgtttcattttgacttccccttcttttttcttccttttcttcgtgttgaggcttctagaagaccttctcttcccatattcgacattcgtttatgtatttcctttcttctaatatttgttgagatcattactgtctttccttgcttctagtcaaatctattgaaatcagaactgcccagttccgacttcatccaccttcgtttttttttttttttcgttttttccctttctttctggttttcttcatttcaccatggccgaaggccacagtgcccctgcagctgaggcgccggcgccagcagcagcagtagcagcagactgtactgctgcaccagtcgccgcagatatgcgctcacacgcccatcatcaaacggcaccgatccatgagcaggagcaggtctcctttggacccttgactcatcggccaacattcttggaacacctggctacctcgcgagacatgcaattcaagcttgatcgacgggatacaagcgagttggaccggtactttgtaagtcatggctgcgagatgatctatataaaacacgaacagaagactaggaaggatcatagacaggcaggctaacatactcttgacctagcatggcccccgaaacatggaaaagcattccaagtggccgataatgttgcgattgcacggcagtgtcatgccaaaaatgatcatgccgcttgtaactatcgctctctggtcgaccgctgttactgtcttttcgaagctggtccatgaccgtgagtaatccccaagtgatagatcaaagaacattctgagttatatactgacgcgaacaagtcggtatcaacaacatcctgctcaccgtgctaggtttcgtggtaggtttggcgttgtcattccgcagctcaactgcatatgagaggtatactattccctggtttttagcttcaactcgagctatacactaaccgcttgcactgcagatgggcagacgggcgcaaatattgggcccagctcattcaaacgtctcgcaacctctcgcgtacaatttggatcaataccggcgagagagaaggcgaagcaggaaaagatgacatcttgagaaaactgtacgtgatacctctggagtttatcctggtatcgattctaacaagctgtctatagctccgcgatgaacctcattctggccttcgccgtctcccttaaacacaagctccgcttcgaacccgatatcgcatacgaggatctggctggcctggttggacaccttgatacctttgcccgtgatgcccacgaccgcatggttgtcaaccctccgcctaaatccacttggaagtccgcaggagagtaccttggcatgtccttcgccgagtcaaaccctcgcaagtatgtcaaacggtcgaagaagcctctcggacatttgcccctggagatcctcaaccatttgtccgcgtatatggattcatgtgtagtcaacggtactctggtttcgactctgcaccaaggacaagctagtaagtgtctaaccccctatcttgtgtgctccaactctaaccgaacaaaagtcgccatggtggccaccttgaatgagatcttgaccggcacagaacgtgtactggacacccccttgcccaccgcatacagcattgccattgcccagatctcatggatctacatcctggtacttccattccagctctacaatgccttagaatggatgaccattccagcatcgattggtaagaacaacagaatcctcccccctacacaagtccaaaagaaattctaacagaccccgaagtggctgcctatatcatcctcggcttagccacgatcggcagcgaaatcgagaaccccttcggtcaggatgtgaacgatctcccgctggacacctactgccgacagatcgccctggaaatggatatcatgactgctgtgccccgaccaaatgtcgacgacttcatgtcgcgtgctgaaaacctcgttctattccctcttagccagttaggataccctgaatggaaagagcggagcgtcgacgatattcgcagcgcacttagagctaagatggtcgccagcccgtcgtcttcgtcgtctgctgcatctacaatttcggaaagcattcgtcccaagactactgggtcatcagtctgatcttcatcttccttgaaaatctgtcaccaacaaccagggggaaatacaaccggtaatcttcctggcagggtgagaattaattgtgcattttaataagcggcatcaaattgtttgtgataattgacaaacgcgtgggtcatggcgttttcatttgagtcatgttgactccaaaaatcaaccacaaaaaaaaagggagttcattcttgtcttgcagttgcagttggttgcgtacatagattgacattgtctccaaaatttatttcctttgtcctcatcgcacgcgaactttccaaagtgctagtatgtatgtcttcagccgccgatgtaggccaattgtctgtgtctcattccttcccatggagctagacacaagcttagtctcaggtattcgattattgcccggctcgcggtagggaaccaagccaatctcgatccatttggagctggcattgccgtcgcatatatcgtgggcggttactgcagcagccctgcagccacacccatgcctagtcccacgtagtatgcacaacatcaggcgtgaattgcgagtaaattcggatgggcctcgccatagcccgagggcaatactttgacaaagagtcaaaatatatagactagtcatagttcaaaatcggttctcgtactcgctttgaagcaagagtacagccagcaagtctagggaacgaataaatcggccccagagccagcaaccagagcacctaggaagtttcccttggcgcaaactctccacgcaacatctccagagcttgccgaattatttccgccgccaatccatgagctcacggcgctcacgacggctgaggcatcctcgcgagggacgcgaatccacataatatggtacttcgtggttgatggagatccgtcctcgatctttaggatgtcgatcggaatggctgttcctgtcaggccgaggaattgcgacaatgcggaggagaggtaggttcgtgcggagagggcatcgaggggttgcggtgcacttcctggttgggagacactaaaattgcaatgttagctttatttctggcagaccaaaaaagccgacggatagcttacagcttgagcttgaggtatgtccagggtggattgcgcgacgtgaaatggataatttttggctttggctctggcgctttgcgcttcgcagcttccgttacagcgacatttgtgtcaatttccatgtcgccgtgtgtatcctctgtcatactggctagctttttgatctgttcggggtggtcggaggttgatgttcgcccggagctccgccaaaaaaaaaaaaatcacagtgacggcgtcacgggatcaaacaagaatcgaatagagacaaaaatatgagctagcaagtgggaatcaacaggctttaaattcgaaatttatactaggagtctcgcgtattgacagcgtcctttaatatttgtgtcgcacgctgcaagtaggcttcttcgccgtcgtctccgatctccaaatcggcaacacacaacgttttctctcttgatttcgcgccacgaataattccgacattcgactttggaacgttaaatatctaacaaatggtcagatggaaattgtgactgactttattccctagacaagacgggaagcaaggagacacattaatagcccacctctgcgaagacacgcgacactgccatattagatgccccgtcgcgtggaacagcagccacggcaatatcgactctatcaatgccaacatttgtaatacctgcgcgacgagcagaggcgtttggcttcacatagcaagggatgtggaggttgaacagtttccgagaacacggggttttgctagggacgaggcggaggaaagaagccgggctggacattttcagtcgcggtcaagcgaattctacatataattgtggatgtggaatgaagaggttcgagtagaattgattgcagtaaaataaaggagatggatgaagtggccaagacagtcatcgtttagccctaaatgggcgagccgccctacacggtcgatcccaaactagtgctatcacgctttatccttagcatacagtcaagaaaaagttgaaactcataattttaaacaaggctcagcttgcgtattcggctcccacggattccggagctcaacaacaagccaagcacggccatcataacatctagaacgatagatagccacctctggatggtgaataactttggcaatattgccaagtctaactattacgactacaatcaccaatgtagcttctaagtagcatctccacgaggatcttctctagcctaagtgttccgctcgtagctttagggaacctcttcggggctcaactagcttggatcgaagaccggtatatattatcggtctcgatagtcggcagataggcttatatatatgaatattactacgacaagaaaggtccgggaaacaacattgatttatataatacaggatataatgataagttgataacaagtcttcatgcatcggctgcttcatggattgagacaccttggaagaatgtctccaggcgaggagtcactggctcagctttccgctctctgcaagacctcgcgtgtagctccagaaaaatcttccttcagtatataaagaagtacttgctaactcaccttgctcctttggttgatacggtagaagttgaaggtcacgctatccgtagagatcccgtagactgttatatctgtcttcacccgctcgatacagtcggacctcggggggataagggccaccgttagtataaatgggaaatgttatttaagtaaaggcaccggctgggaggataacgagtggcgagggaggatcctgccccggtccgacatagagtatctcgtcgacgatgcgactgcgatgccgcgatatgcgtccctcgggtgagtagtgatctccccacaaacgccgctctgaatagagaacaccagcttctaccggaacccaaaacatatatataggaacgccgatcgatggaggttgccgtctcgacatgagtctcgtcacacccctacttgccacctaggatagagacttctcctaggcactcgcttttcccggatccgcatcatcttccaattccttattcaggtaacgcagaactggttgcgggactgattagttggtagcaactcccacaggcaggttcgacttcttcttcggacattcgtatgtcatatgtcccttttccttgtacctcggaggctatcttggcccacgtccctaaatagcaagcccccattcaaaactagcaggcagatattcggcggtaaggtattcaaagcggcaagcagcccggctttcgacaaatattgtttcgctgcgtgctgagggctaagcgttacagcaccggcttgggcttgaccgtgtccaatcaaggcgattgtggtttcacagcttctttggggttctcatccataacagcaggtgtgcgtcctgtaccatggtgaccttattaatttcttccacggtttcgacccgagtccatccgcttttgccagctaacagcgctggccccaaaatatcacgtcgtcgaatccttagccattaattgtttcaagtagcagggcgggagacgatggaaacaccgagaaccacggtttgagcatatgcgcttgggaattgacaccgtgatcgggtgaacgtataatggaagcgtttggtctccttgatattggcagcgtcgaatcatacaatgaaactcgaatatataattaagcgcaaaggattgtggatgttgcatgggatggggtaatttaaatagaggtcgagaaggaaagagggagatgaacaagatgaaataccgacttaggctcagccttgaagtagttagtaatgagatctaagcgatggtatatagtataaaaatgtgtagagtaaggtgtagatgaaagacagatgagagatagatgagtatgatgtgatatatagaagagtgacaacaaacctatgagttagcttcggctcaggctgaaagaagtcaggaataggatctgggcgatgaagatatacaacatgaaggtcaggtcacatgactccatttcttgttcctaccacaaacctttagttccttcctttttcacgtaactaaagtcatctatcttcatagaccacctcgggcagatcaccattacacgatgggaccgaagaggcgtggagttcccttcccagcctagaatatggaaaaaagcacgaaaaatatggcaccaaactttgaaaggatttcgaaagagttcaaggaagcatccaaatccacattcccttttaagacattcattttcgatccagatcgcagactaagaccaattttgtggtcaccaaaggaaggtctacagcggcatcatctgcttagtacgacaatttaagacctgtcattcacaaatgatccatatcgcggtctccgaaaggagccagatgctcttctccacaatctatcgcagccttttccagctcttatcgcagaggttggatgcagtgagtcgtataatgaccttcttgatgacatgaatcggttactcattaggctagaagtctccaattcgcttcatgcctcagttgaaattgcctcagggcttaatatcaccaacgaggcgcttgaagtgcagtgccgtgcagcggcgcaaatcaaattgtcattcttgttaagtggatgacggcatattttttctgtatgtcttctttagaatcttctttggcatcttccttagcatattcttggtgaaaagcactcttcaagcacaacaggagaagcatatccatccaattttccggatgatagacccagtagccaagaaagatgccaataaagccggccagcataaaagacaaaaagagaacccaagatcttggttatgttataggagatttcattagggaccagtgtaggacagggtaatttaaagagaagatgagaagtagacagggagatggagaaaagaaacaagatgaaatatgtcgaccactaactatgtaccgaagagatgaagccgtcacccgactccgttagcacccacacctctattgcagaagagactcaagatctgcaacacgagtacctctatcctcggccttctttttcgtctctcggaaagcagcctgcattagactcctcttacgctcctggatcgccaacacccgctcctcaatactatcttccatgaccagtctccagactgtcgtctcccgcttctgcccaagccgatacacccgatcgacggcttgatcctcgatagcaggcgcccaccaactgtcacacaagatgacctggtttgctgcaacgaggttgagaccaacactgcacacgctcagacttgcgaggaggacagtacactcggggtcgttggagaatgagttaatggagttgtcgcgtttcacagactgcatcttgccatctacgcgggcgaacttgatcccgcgctgcttaaggtgtggctcgatgagatttaggaatgatgtccattggctgaagactacggtctttgttcctggtgcctggccctgagcagtcaggatcttgactagggtctcaatcttgctgcttggactgtcggggtcggcctcaacgatgtcagtgtcttcacccagttccgcagctggggagacgagtgtgttggtttccttgatatctgcgcggcagagcggacacttgtgttggcgttcgataacctgctcgatgcagccccggcaataggcgtgggcgcaggcggttatgacgggttgctctaggttgtcgaggcagatggcacacagttcttggctttctatctggagctgcagcatctcttgtagagcacggacgttctcgggtgtcagaggcacgactttgtgttcctccaacatgcccatgagtttgtcgatgcggtttttgcagagcgcccagtgattgcagacttgacgaagtcggagaagaacctcgagaagatgagagtatttagtcttgccatctttgtccttgaagtcgagaagagcaccctgggcctcggttctatgattgttattagcaaatttgttttcactgtgggtagtcactcgatacatactggaaagcatggtacttttcctgttcatgagcattgaacttgattctaatgagacgagacgtcatctcgggtagcttcaaattgataaagctcatatccttcctacgtcgtaagcagatggtgcccatgagagcctcaagcagcagtcgagcctcgggctctcctgcagttaagggtcgaatcaagacactgttgaagatccccaaatcttccaatccaccggaaaacttaaggaaacgtatttgcgcatacaaatccttcagagtgttgataatgggggttccggtcagggtccagcgggagtcggcacgtaagccacaagccgcaagggaggctttggaactgggattgcggatggtatggccttcgtcaagtacgacacgacgccagtgcaccgaaaagatgcccttagctggcgtcttatttgctttcgggttgaagtccagggccagggctccatagctagtgattacaacatcatacttggccaagtttgcagcttccttcttcccagagccgtgatagatcaagacactcggggcggtctccttatgggcgtggtcttggatctgatttctccagttgctcataacaccgacaggggcaatgatcaaagtggtcttagaggagcctgcagtgagaggctttgcatttgaaagaatcaatgagatgatctggattgtcttgcccaagcccatgtcatcagcaagaataccaccactggcgagggctggctccgtggctgtggcataatttgttgcgatattgagaaagtcattatttttccgcttccacaattgcacgatatcatcagagccccttgcgggaaggcttggcgattcttgcttgatcatccaagctagtccttggcgctgatatggaagcaactgggtggaaaggccggctggagtatcgaccatcggcaaattaaccaggtcagactccttctgtccgaaagtttccacaacctggccaatatctcggggattgaaggtggagctctggttaaggagttcctccaagctttcactttgctcgccaccaagtcccgttggaatcgagaggttcgcatactctgggttctggttggcttgccattttgcagctttgccaagagccatggcgcgagctttctttgcggcctccttctgctgtttctcggctgctttctctgccttgcgctcctcgtgctccaactcgttcatttggcgcacaggaagcttgtccttctgcattcgttgcttcagattagttcgtctggtaggctcgcaagttccgaacagtttcaaatcaacagggcatgtataatccccaatcgcaccagtcagcgtgccttcaataatgagatcacgagcatcctttgatgacgaacgttagcaaaatatcggaagcaatatgattggagattcttaccatatatgacgccaacttagctgccatctgtcgtggaatgtggccgatttgggcgcccatgacattagtaaccttaatagcattgctatcgtattgattattagaatcccgaattatgatgacccgttcacctgggctggcacgacccctgtaaaagcgtacaccaacgatctttgtggaaacgatacctattgggtgctgtttagtatggtttctagatcatccgtacacgagggaccgagattatgtggaaaggagcataccatagaggattgagcttgttaaagaggtttcatccacttcctgggacccttgaagcacatcgagcgcttcctcatcctcttcatcggcgccaactacttgcgacaactgattcaatggaatgaagtcggccgactcgccaaatctctggcccgaactagtatcctggtccaacggaatgtagtcgacagtctcgccgaatcgttggcctgggctggctttttcggtgttcaaagtcggggctgtgcggatgatttttggcgcacgaccagcgtctccggtagaaccgggggccttgcgttttactaccatttccccccggcttcacccaacaaagttgatataaactttggcaatgatgatgatgtggagattgtggactctcggagaagtgcaaatatgtccggggccctgccctctcaaaaaaatactctcgctatgacaaattcaaaaagcaaaagaccgcgcaaataactgataaagaaattgttgtctccagagcttgtcatatagagcgctaactatttgtgacgcgtcgagacacggcttcacgtgaccggggagaaaacggataagtcacgtggcatcgacgctgataactcgccgcccgctgagtggacgatcggttgacaccccgggggcgagacccacggggggtcttcacaagatagttgattagtcgatgtatgaggtacgataacaagctgattatcgcgggcaatttatcgaaaatattcgtgtcctgagctctctcaatgcatcatctcgtccagagtactgtttcaatcgtctggatatagcctggatatagcccggatatagctctttgtcgtgcggagaacaggccgacggggtatatcccgttccccggattttattcgttccaaggctgtcggggagttcccaccagtgtcttgacagccctcttcctacctctttgcaaattatgtccgtttcgcagctcaaagtgatgccgtcctatcagccattccaatgtctcatctgtcaaagtcgatttactcgacacgagaacctcaagcgacatgcaacgctacactcccgttctcaggccgaggcgtcgcttccctgcgacttctgccacgctaccttctcccgtcccgacttgcgcaatcgccacatgaagagaaaacatccagagcacgagcagcaccgagtgacgaaaaggacacagcgtcaaccagcacccagacaagacaggctgaattcttctgtatcgccgacagcaatctcgcctgcaggaagccagggtggcttgccttctcctggatctgtgcattccagtccaggagaggagacgaggtttgatagcgatgcaatctggcatccagtgatgcggtatcagcagcagttcgacagtggccaccccgcgcaaaacccaaatattcctgcgccggggaccgggatagccaagacgcaaccgacaagaggcctgttacaacaatcgacgacgagtgactctatcctcatcgatcagattgtccaggacgctacagatctggagcggagcttactattagggacatccttcctgaaacccaccactcaccttgacaaccaactacatccgatggccaccgcacaaaccgagccactcaatacaagtctagttgaatacaatttcgaccacccgattttagatagattatcgccaaatgacatccctcaactccaagacgattgggccccgagtcccttacaaatttcacgaggctgcaacttatttttcgcctcggtctctcatttcctcccctttctccattcctcgactttcgatccgacacaagttcctcctcatttggtcctcagtatgctctgcctcgcctatcaatacggcgaggacccggaatgcggggatcaagaaggctcaggcgaaagcttttctatacgttgctttcataaagctcgagctgtccttgcttctgacgaagagaggccggacgcttcgacgatgatcaccacactggttcaatcatacctgctccttgaaatctgtgccatgatgtacctttgtggcgacaattcggcgtgcggcctcaagatgcattcgcacataatctccctggctcgtgctggacgaatgacacaaccaatgactgttgagtctggtgcgaccgcagatttggagtcattatggcgggagtttgtcaaagccgagtcgcacaaacgaacccttttcgcggtgcatcagatcgacgcactctggtaccaattcctttccattccccgctcaatctcacacctggaaatcaagcatgatatgccttgtccagaagaccaatggtcatcatcctctgctgctgaatgggcccatcggcagctcgttgcaagaaatggcggcccctcggtgacatacaccgatactgttcgacgcttcctttcctctggtgatgagatcgcctcccttccatcatttgatccgtacggcgccattaacatcgcgcaatttctgatctccagcgcccgggaaatctcaggctggtccacaatgacgggaatgctgagcatggagcgattcggcgcattaagatcatccctcgtcgcacttagcccgtttatctgtcccggtaaccactcggcacaaacaaagaacgtgactccatctgcaacttgggagactgccatggtcgagctgcagatgtggtcaccatcccacactggtggcattgtggaaggaagcatagatgccgttctcagtcagtcaacatatttgggaccgtctcagtttctgtgcgatgccaacacggccaaagctatacaaccacatgtcaactggttcttacgatatctcgacgagacgctcatgttggactctgaagcgccatgggttactctgtctgcgtacaaagcctttctgattgcctggcagctaatacatggtggcctgcctggcgcaatggaagttgtgggcatccgtgatggtgatatggagggagctctgatgtgggcgagaaaggtctttcaacgaagacggaaatggcagattgggaaactcatcttgtcttgtttggatgaattagagaaatgaattacggtcttataatgctttaattatttacgaatgtgtcttgtgttattattttgcaggtttgaacaattcaatcattcccaagtataatccactgttattttcatttccctaagctagaatatcccataaccatgtgacaataaacccataccgatcccagcaaacacgattaacataataacaaaacaacataatcattgatcagtacatttcgtaacgccagccgagctgtaccatttcctctgtgacgccacccttgacgaccttggctatttccactggatctcccgagtccagacgtttgttctcgcgcagaatgagccagcggtatatcgtgattgtgatagcgaacaagacagcagcacccataagcgtgccaaaggcaacgtagaaatgaggctctccaaagtataggtatgaggcccagatgttggacgtaccaccgatggcattgaccaaggcagaggcagccgctcgctttgagatcggtcgtgcaaggtgcaggttgatggtcttgtagaggagaagttggggaccgacggaggcgaatggcagtatcatcatggagaagtagcgggcgccgacgttcgtagtcgccatcgggatgatgtacatcgggatcgagatggcgatgcacatgaggatgatggggtagacgaggttctttcggtcggaccagaacatgaggccgtagtagacgatgccggcgaggatataggggggtgcggtgaggagcaaactgatggtgctggagaagttgagcgagctcacgagggtggggaagtagttggcgatggagccttgtgtttgggacagcatgttgcacatgatgagcagcaacagcttggggtctgcaagggctttcataaatcctttcagcacgctctcgttctctgtgccctctgcagcaccggcttcggactcgagacgccacacggcgcagtcacgctcaagcggggagaggatacggctgttgtgggggaattctggcatgatgcaggcacagatgatgccgatgccgacggtggcacagccctcgatgatgaatagccatctccagccgcggatgccgtggtgtccatcaagttggaggatggcggcagcgaaaagaccaccgaaggcattaccgacttgctgggcaatgtagagcccggcaatacgctttcctagctccttctttgtgtaccaggcagagaggtaatagatggctccggggaagaagacggcttcgacggctccgaggatggctcgaacagcaaggagttgaccatatgagtggactgccgctgtgcaagccgagatcgcaccccagatcgccacggcaccacagatgtacatgcctggtcgggagaacttcgtaatgatgaggttgctgggaatttggaagggcaagtagccgacaaatagaatggaaatagacgtggcgaattgctcagtggtcatgttcagatcgtccatgatgccctgaagttttgctgcactcaagttctgacgatcgatgtagttcagaatgtacaggatgccaatggttggaaggatgaagaagtcaatcttgcggacgagcttcttgttgatggcactgaactcatcgtcgctgagtccgcgaagggactctggcatacggttgtaggcatcgagttgcccttctgctgacgagacattgtcttcagccaggatagactctttcttgtccacagggaaggacatgacgacggtagtacttctgttgccaagaccacagcaggtataaacgatggagactgtgcagagtgatgcaggttgcaggctatgtcctccagacgatacttgagctccccctatatagttcgacgcagtctctgcccttgtcggcttagcgtagagtcattacaaatatccgatctcggtcaatagatgaccaggatacctgttcaaaaaatctcgaggcattgattggtggagattggtcgaggttcggtcattcgtagttgataagtgagacgtgtagataggactggagataagcgcaccaacgagcgtccaatggttatctgtccaattggaatcgactaccccggatggagagtttggttgaaatctggggtgcatggagctaacatttgggaggagctcccatattgtcgataagaagtttttgggaggtgcaggtggagatttctttcaaacgcagacgagcttagtggccatgtagaatatatctctaatcataggggcaactcacatacaatattccaatatttcgggagggccgctaattttggccgttaaacaagataagccactccgaagttttgccactagtctgccctaactccatgcaagagctccatgtttaccatgtcgaagctccgcattttagcttgatatttccaatcttagtctaaataaatgaggggcttaagaatacgtaaaccaataaatgatacttaagctggcataccatcaacatcttgtcttcatcttactcacaaacctccaacggacaataccaaaccatcacctctatttccaatatctactatcacaatggcttacgctactcccctcactaccacgatcgataaccctcgcttgagacttctcaacaagctcaaggccggcgagtacccgctcatgaccttcatggccatcccctccatccgccaggcccagatcgttgccttgaccggcgtcgacggtatcattattgattgtgagcacggtcacattggtgacgatgctatgcacaactctgtcgctgccatttccgcccttggtgtctctcccgtcatccgaatccgtggccctgcccacgatatcctcaagcgtgccctcgataccggtgcccacggtatcatggttccccagatcaacaatgctgaagaggccgcacaaattgtcgcttcctccaagttccctcctcagggtgttcgtggccagggttccgctttccccgcaattgcccacggcctcaccactcctgagtacatgaagtccgccaacgagaccatcatcaccatgattcaaatagagacccgtgccggtgtcgagaacgtcgatgctatctgcgctgtgcccggtgtggacgttgtcttcattggacccaacgatcttgcccagtccttgcttggatacacacctgctcgcggtgacgagcctgagtttgttgctgctattgataagattattgctgctgcgcgcaagcatggcaagtgggctgctcgcatggttaacaatggtacagtagccaaggaggctcgggagcgttacgataccgtcgccattactggtgacaccaaggcgattcagaactggtacatggcagagtttgagattgcccgttcatgacgattttatgttaccttacgatagactttcatataaaaattttaaatagacaattttgagtttcattacttcttccccatgaaagtttaactacggataacatccgatctagctcattacgtgtcttgctcggtcatgagaatgagataaaagccacgaatccttttcaagccccgagacatattcccttgctgtctaatctatctggccggaaacagaaaaaaggaagaaataacaattcatttattcgcattttacatgaaaaaaactgctccaccgccgtgataatgaagattgcccttcgtcttgattggcaacacgcttgatttacgagcagaagcttaaatacgaagtagtcacacacactacgtaactaatatttctgacttccgggagtgatccgcacttgattaaggccatatttagttaatatagtagttaataattacatagcatatcgttactctacataatatgggcaacttgatactcagtccaaaaagaattttatttttcgtctatattgtagccattttcataatatcataatttatgcttgcgcgatgcactcaatctcaataacggtaccgtttccgggggcaaccgcctgaaggcatgagcgagctggcatgggttgtgggaggaaatcgatgtatgcctcgttcataccagcgaaatccttcatatcggcaaggtagacgttgaacttgacaacctgctcgagggaagagccggaaagctcgaggacctccttcaggttctgcagaacggttctctgtgtgaaagcaaaaaaattagccaatgccttgacacccgataattgtttgtgcaattgaacttacagtagcctgcttgatctctcctgtggcagtttggcctgcgcagaagacgagtccggggactttgacagcagggcctggatagcttggtcagtgatgttctttctttatttattccaatagaatgcaacatgttttgcggccagatactcacagttgtgaggcttggtagggaacttctcgctagagatgagttgacgagacatcttgttggtagtttgaaaaattattggagtgtgttgatagtgtagtttcaagagtgtgtcaagaagtttgaactccagaagtactagacaagagcttgtttaaattgctcgagctaccccacacgcctctctatccgaggcatgctgctaatcaagaagaggggcaattttcattatcacgacggaggagcagttattttttgctaatgatttattcgttatcactttcccagcagatatgctgggaggagttgagtggggagtagagtggagtgggaggagtgggaggagtgagaatgggaggagcacaatatctggagtcgattattgcggccatgtttgtaaaaaggtctctcagtgcgtgaatccccgcgcagtaagcaaagctgactatctggccgcaatctatgcttgtatataaatctaactcccggcaacacccggtggagatcgtattccaatccaggactagcgcaaaccttgtagattatgcttaagcgctaacgtccatagatgccctaaggtggaggagcccccgtggttccgttcatgataacgaaagatgacaaggcgagctgaaaataggaaaaatgtggagaagtttagcagggagcacccagaatggcaattatcatgcccagaatccagtggcgcactagcgtcgataaccctcctgctctcatctcatctaatccggatgatcatgccagactcacctccccggatatcggatgcacagatagggtttcatgtctctccattcgattagtataaagatatagaactcgatcagataatcttctgtattgtcttcagcatcgatcacaacatcgaacagtctttgaacattctttgcacatcaactaccatggccgtttctgctcccttcaatcctccttcggctgacctgcctggcaagccttttgtcccaacatgggttcccccgccgatcactcagcaaaaggagaattttgctgagcttagctccattgatctttctttgctggactcggatgaccctgctgttgttgataagcttgttcagcaggttaagggcgccattcgtgacgatggattccttttcctcgagaactacggaatttccctagagcaggtaagtcttggttcttaggatattctgataccaacattgctaataacatctttcaatagctccaccgccaattctctcttgcccagtatctttaccaaaacatcagcgaagaggacaaggaacgtcttctgttcgatcctgaaactggtgtttggtcgggttacaagcacccttacggattcaaggtaagaggatctccctcatgcatcaagaaaatccaagcctatacttactctccctttttgtgattagcgcgaacgcggacctgaagacggtatcgaacaattcaactggtacaagcccgactggagcgacatcaaccgtgtgcccaaatgtcttcaccccttcatggacgagatcgaagagttcgccaactacctgaccaagtccgtcaaccgccgcctcctgactctcttctcccgagtcctcgagttgcccgatgactatctctgggataacgttcagtcccacggttgcccaactggcgagggctacttccgccatgcgcttttccgccccgtccagaagaagaccgaggaggcatccaagggcctgcgtatgcacggccacaccgactttggtctgacaacattgctcttctctgtgcccgtctcgtgtctccagatttggggccgcgatgaaaagtggtactacgtgccctacaagcccggtgcgcttgtcattaacatcggcgataccctggagattgtctccggtggccatttcaaggctactcgtcaccgtgtttacaagcctcctgtcgatcaattgcaacaggagcgtctctccctggtgctcttcaacagttccgttggtgatttgcgcatgggtcctgccacaggttagtagattcgcacattggttaaacacaaggactacgctaacgtcatattttatagcttcgcctcttatccaaagagtgggctgtgttgaggaacaaggtgtctacaaggagttcaagagcctcacatcccaaggaaagcttgtgcctaccaaccgtcaatggcgcgagatccagatcgctaccgctactgatcctacggatcaagagcgcaaccgagttggtgctgaccaggttcttattgatggcaagattatgcaccaacgggagtacatgggtgtcaaggttgtcctgcctgtttaaaccaaaatgcagccaatgagtggaagtgtttgttgttttgatattattacccctgttttcctggatgatttatgccgacagattgtatgcaagattcatatttatatatagcgttggaatttgagagttgttataattatacatttccaatgtgtaaaatttgtagctcactgcccaagtgtacatacagccacggtgaattagggacgctaaatatccttaacctatcatcaaataataataattcttagctaatgttcttagaatggaagttcagaaattgaaaacggaatactgttacagcttctttccaaatatccccatattatcattaaatagagactagagtccctaaagcactaatcccaatgaggccttaatagagagcgtagcagtgtagaggtgatataagttgtgtctttggctatgactcaatttctacaactctccttggctgaggcaggacaattgtatatcatctcacattgtggtttgctcctgtcttcgaaagtagtattattgagatcttcgactgccacacaaggactgtgtaaaacttttatttttattcttgatatcgtgaaaagagcgagaccgctgttaagttcagaaatatgtgaataaaatttggctctgattctaaaagctattttaaccctccagctaggagaagactctggcccgtcatgtacccagtcttcgctagcatagtaacaacattcgccgtttcttctggagttcctagtcgcttaagaggaatactctctaccacttcagggtacgctgccgcagaggaaagcatgcctgtaccaccgatcatagctggggcgacgtcgttgacactaatattgtactctgccagtctggttgaaagattcttcatcataccggtaagaccacccttggaggctgcgtagtctagattggaaaactgaatcagcaattgccttcaaggaacaaaaggccagtggaccaagggcagtggattgacttacgacagccgttaattcctccaccctgagcggcgatggaggacatgaagatgatccgcccccacttctgggccttcatgtgctctaccacgcctttgacaagaatgaaggcagcgcggaggttgatattcatagtgaaatcaaactcctcaagtgagatatctgacacgtcgggaattcgcttgccatatccggcgttcgatataagaatgtctggacgctggccgtgctcaagatcaatttgttgaaacatagcctcgatttgatcgccagacccaacatcaacctggtggattgaaatgcgaaggtcctgcgtggcattcttggagcgtatatctgcgacaatattgttcatggatgtcaaatttgtcgagtaggtcaaggcgagatgaactccatgttgtgcaagttggtgtgcgcaagctgcaccgattctagagtcggccgcaaattagcttcatgaccttgtataagctgtggatgttccgcttaccctccagatgcgccggtgattacggccaatttacctcgaatgtcgttgaatgccattgcgaatataggaagtgcaagtatactgatccagctaagagattaagatgacacagaacaagatattgaacattgtgggacctcaatattaccccggcattggagattccccgttatcgaaagctattcctgacagtagactgcaggtcaagattgccatgatacggagtatcttccgtgaataagaaaagtggatagagtgggttcgtcaatgaagggagctcctcccaagttgccaacgtcagcagccctaaagatagatagtgacaaggctattcaaagcaaacctcattatctatctatcgttaatattgagttctgttaatctcgagttatgtgttcattctccaaactttgttttcggcgaagatagtcagttgcgctcatggaaggtggttgtagcaaggggaatcgattcctgaggttttatcgtggcctgaggcattagaggtcacacttcaaggcacgtgatgatatctgtaaacgtcactatcaattaagagcaatggcctgtgaaaggcgtggattcctcaaattccgaatcggtcatttttagcgcatccccgcgtactccatattattgaggcattagtggcgcccccgtgttccacatggccgatccccgctatggctcctacagggatctggccaaggactatgagacccgacttgataccctaatagaacaagggatctttaagccagtttttctatatcatgttgtcattctcaacattatacccttgataggtctggtcattcctcgcagcaagggcggacaatatgttcgaaagggccttttcgtcctctgtattgcaattgcaatcgaaattttccaaaatcgacgggcaatcatcggaggaaatggctacatgcttggtttgatgaccgcgtggtggttagtatggaatgccacgttgtttgtgtttacagaccttgaacatgatttcaagcgcattgaacggaaacccgtcgatatcaagtcaaatgacgccaagacgctctgctcgaacaatccaacatgtacacaacaggacagcaacctttttatttggcggtcatatcccaaaaagttctggcatcgtctggaatggtccgctggactgctcttcaacctgagggggccagagtggaactggcggacttcccatctgggtcctcttccacgaccaattcacgaccaattgcatccaggattcgtgggtaaaataaaggcacatgaaccctccacatatcccaacggcaaacaccgcttgcaggctgcctttcgaaagttcctcatatcttaccttgtgctggacatcttgaaagtcatagtcctgatgcctgatccatactttcaaggcctcgctccggctgattcactatcaccatttcctttcttctacttcacaaattttacattgcatcctgccatatcccagatctgtcgtcgtctatacagcgccataagtgtatatactgcactcgagttcgtgacatcgctcaatccaatcttcttcctggggctatctcttgcattccccaacggggctaggaagctgaccgccgcaccgttgggtgcttcatggctatattccgatgcattcggcccattcttcgtcccggtccttgatgacggattggcgggctgctggggtcgttggtggcatcaaatcttccgatacggatttgtagcttcagcacgctggatcttatccgtgcttccggtcggcttggcttcccatccccaagtccgtcgtgtcacttacgtaatggtggctttctgtcttagcggctttgtgcatgcctgtggaagccgtacccagattgcagatacatctcccgtgtccgggccattcctatttttcgctttgcagggtgttgcaatcatggcggagcaggttttcaagacatcggtcttcccgaaatcaccttttgcccgtgcgccgagatggctgagacgaacgactaactttgtgtttgtattttgttggttaatggcctcaggtgggctcatcgcggatgactttgcgaggggcggcttatggctgatggagcctcttccaattagtccacttcgtggactgggatttgggctacaggggcaaggttggtggtgctgggatgagccctggttccggtactggagtgatggtacatattggggaagcggaatacgtgcgttatagaattgatagatctagaatttgaggttacttgagatccttgaagtcactgcatgtccacgaaataaattacatgatcgacagtttatgagacatataattatgatatctacccgtccattgtaacatcgtcatcctcttcgtcggtgtcagattcaatattcaaagtgggcaattcatcatcgctatcatcaactgcctcctctgtggcctgcgagatcagggtcgtagatgtggtggacacctgcgttgaaagcttcggggcctcagtcttgctgattgcaggagctggctgagagaaaggctgtgggttcgaggtgcttgggataattccgtcgaatcgcgccttcttggactgaacatcctgcgtctgtggtgttgactcctcagctgtgggttcttcggtataggtccgcttgtggaaagtaggcaccggagttgcagccttcgaatcgtccggcttcggtacttgcaagggcaccgacacaggttgcttcagaaattcggtagtctttggggcggcgttgtatgaatcatcagccatgtcctcatcttctgcttcttcgtcttcatcgacataggcgtcaagctcaggcgcagtcatcaggacaggcatcctgggacgaaccagagcctccacctccatctgatcagcataaggcctggtcaagaatggaatgatactcgagcctgccccacggcccttgactgccgggacagggttgagtacgctagcaaacatcgcatccttgtcggatgtcaaaataacggagcggtccatttcaacccggatggagggcggaacaagctcggcggggatagaaaggagcacggcctgcaaaagcccagatgcattctgctgaatttccaaaaacggagaggccgcttgtggctggcggaatttctgaatatcagggttcaaaaaggtatccgcattggctgtcccttgtccgccctttgactttgctttagagtcagagcccagatttcctgtagagctggaatcttcagtcgacgacagtatatcattgcagcatgagcgtaagacgtttgtcaaagacaccacgctctgtttcgtcatggcaggtccgttgaccggcaccatagagcgaagcaaagcatagactgctgaacgtaggtctctattgaacttttcgcctttaaaagtccacacagcttgctctagtatagtttgcgtgacggaggttgcgctggtcgccaatataccgacaacgttggaaagcaaacccatgcatgcaatgtgaatgcgaggcagctccatccaaagtgcctctcgctcgtcacggccaatttcctggttgaactgaatgccagaagatgcggcaccattgggtggaacagtaacagaagtgagtcgggaggttaaatcgagaatagagcccatcggaagggcaactgcagctgcagatggcattgagatgaaatcagagagaatctgcagaagcgcaatcaatctatccacgcccgagtgcagtccgctccagcctggaagtccaagaccatctgggcccccgtcacccatttcttggctatagtttggccgtgtgtgcaccagagtcgcatcgacagactcccactgctctacgacggctcggaaaacgtggtctgtcgttcggtggatagacaaaatagtcgacttgcaatcgtctttccatccagatcccgcctggtccttgggtgcgcacttgtggagagagacgagcagctgctcagctgcgtcgatcacatgctccggaaaatacgcaggcgaagaagagccaattacttcggcgagaagagttcggagctgggcattaaagggacggaagatggtgatatgtctcgggatcaattccagcaaggcgtgcaggacaatttccatgaatggggtgttgggcctcggctgtcggattgagcccgaaggagtcttcgtgatggtagagaccaagttcaaggcagcggtaacgaatcccggaagttgtggggttgtgatctcacggacaagtgttgggtactgataagtgaggtggaaaatacgagttagtgtgataatacacatctttctcgtagatatcggatcaggtttctagaaacgcattagtatagctaacataaataatggggtccaatttaattcatactgcgaggatgctgatcaagctgcgaacaataggctcatagtcacgcaggatttcccattggccagcttcgactgtagcctttaccagaacaacggcggtccatcttccctcaacactgcggtcctgtaacagactcgctagtctagtcttcagtttatgaatttgaatagcattttcagagtccgatttgccagatttttgagtttgaggggtagagagcagctcagcgcaatcgttcaatgaagtcgccaggaacgaagctatcgagggtaattgctcgaccggagtagttgtcaggcgatgcgtgatggcgcgcaaagtagtagaagacatggcaactggaacagacctgtatcacaggacttgacttcaaaattagtccaattgatggaaaaatgagtgccgacgaaagatggaagtcttatcgataacttttttttccatcgaaaagctcggaccaccacgattaaattactgtcacgtacgtaatcgctccccacccctggacaatcatcaggcttcagtgaacgttgacgaccttgggacgttggcgaagcttgattgctattctccctttttgcatcattcacaactctcctaatcatggctgtaagtgttattcttgcgtctcattcaacgttttctggtttatatttcttctaaatcattgatacactcagtatttatgttgacatgcgcgaatcagggaggtaatgccgagaagggtcagggctacatcgcggccttggaccaggcgcggagccacggaaaatgggatgagctccccgaattgattcgaaaggtcacaaagcacgcatcgcagaggacttgtacgccaccggcccttggtttttttatctcagcctaaccgggctgtctctaggcctgatacagaccgcaacggcagaatcgcgtgtgattgcgtatcttcaacaaaagtcctccggcgactcatcctcttcctcaccgaatctggtcgagctgatccccgctctattgatgacaattgagaataatgacgggtccccacaagaattattgcaagcgcaggtgtgtctagggtggatacactgggtattggatgagcctgcacttgcggcagcgcgtctccctaaggatttcgcgggaatactcgatagcttggctggtggaggcgagcaacccacgtcgtggacggaggtctgtttagtgaagggatgctgcatcaagggtatgtttacttttacttccggatgtagccagttattaatctgacagcaaaccagcaaccgcacaatctgttgctggagacattcatgagtcattggagacatctgtctctctggttccatggctaagcggcggcaaattgacctcaatcaccaccccgcaattcctgaactggtccgagtcacttctgggtaatggtgctcttttggctagtgatgaagtgactaaacatgcgccctattcggatcataggcatgcagatattgccttgcaattgctcaggtcatgggcggctcatcctgtcgtgaaacagggagtctctgctaacagcccatcgaatgtggatgacttcgcctcggctcctcgggcatcggtatggactgcttattataggttcctcacagcagtcctacagggtgggcttacatataccggccccaatgatgggccggaccgcccgcaactttgcaatgaattgcgtcgcgtagagactatctacgaacgcaatcttctctctgaggtcacatttcctacggccagcacccaaaactcgcaagtcgaggaatgggtggagcaggtaattagtaactggcaagtcttgtgtggtcccgagtggcaggattcggatgtcggcgaaggaggccagaatgcagttggtcgtaatgtgttagaggtgagtctaacaacagatctcatcaaaccatatgtactaaacacgtgttgtcctagattctgtaccgggcagcaacaaggacctaccactctcatttggtactccgacgtctctttcatgttcattctgctttggcagactttgacttcgctgtgaaggcgctcgaatcctatattgagattgtcactgcagccaaagaaagagcagagaagtctgctgagtccggccagctggaagatgatgaagtattgctacagacgctctctgaaggtgtcacattattgagctgccttggctcgctggaagaggcagagaaggcccgagatctgactgaacttataagagagtatatcgacaagcacaacacgcctcccacaaacggtcttgtcaatggcaattctaccaacttgccaaatatccccccctccgtgttggcctcctcctaccgagccattggtgttggacttgcctgctgggcaagctggactcctgtgaatgaatcacgcgatgaaattagagctgatgcgatcgaatacctggaaaagagtcttgctccagagttgggatgtagctccaattattcctcactttacaccctaggccttgtcttggccgagagcagagacttggacactgcaattgactatgtcaagtcagctctgacaccaagcagctcatctactgccgtatctgatgatctttccaaagaacgtgacttggtatcgttgtggcatctgcttgccctgctgctgagtgcaaaacaagagttcgagattgctgggcgttcatgtgaggctgcattcgagcagtttcccaaagagttgttctcgaagggtcgcgaacggcgttcatcaaagaaccccaaccagcgccccattgtcagcagattgcaaggtagagaaaaagaacgcatcgtccaaactcgcattacccagcttgcatttatcgagctcctggaaggacctgaagctgctgtcaaccacagcacacaattattgagtctttttggcactctttttaaggatctggacctcgaggctggggagaacaaatccaaggcagaccacttagtgccaccaaagagctctgccggaactatcaggagcttccgtggaagcattttcggccgaaatagaacgagccagttgccagatcgccgtgctgatcagagtagtggttctgattccgccattccgcccaccccagctattcccaacggtcatatgacggatgccccgtcaatccaagtcacggacgaagatcctcacagtcgtcagccaacggtcgggagggcagactctaagaaactgaaaaagcgaactttaagctttcataaaaacgagagaccgcgcgttgaagagcctccacttcctattgagggtgaaacatctgcagacatggtcggcattgcattttctggcaacacatcaacagagtccgcgatccgtcctaacaaaggcaaacagccattgccggcgatggcacacaacatgaactataaacaagagcctctccctatcggccatgaggaacaaccccctaagcaggatgtccggctcccaatcggctaccgtttcgattctcccacaagcgccgttatgaagtatcctctagttcaatcccagaagcacgccttaggtcttctcgtcaaaatctggcttgttatcgcgggtctttatcgccgagcttccctgttcgaagatgcccgcgagtcgtgtcaagaagcttcgaaacaagccgcgcgagtggaagcactcgttgcatcagaagaatgctccgctcgatcttttagcaagcgcggctggggtgcctccaagagctctgaggagctttgggctgatgtttacgcggagcaaggtcttttgtcccaagctcgatcgaggccccatgaagccattaggcactttgaggaagcgctgctgcgctaccaagaccacccaacggcgactattggacttgccaatcttctcttggacatttgggaccagaaattaaccccagagccagcgaatgccgacgtggatcttaacgtcgcacgtctgtcattgctggcggagacccccagccccaagtctgcgcaggccatctcgaccgacgatctcaaggtatcaagcgagaccgataatgcgggtcacgaagaagtttctttatccgcacaagatgtcgagcctaagcaactgcaccgtctcgcggcccgcgatcgcgcctatgggcttctttctgcgttgacaaagctcggaagctcctgggacaactctgaggcatggtatgcgttgtcgagagtgtacgaggctggtgagcaggtcgaaaagctgaaagaagttctttggtggtgcattgaactggaggatcgaaggccaattcggcactggtccaatatcggctccggtgtctatgtcctataataaaggtaacaaaatcctgtatcttcctgtatctacttcattttggatatcctagacccttgttacatgtcacgtatagtcctactaattgtaaagggtaaaaacctggcacgtaccgcaatagccagatcaattgggcaggacgttataaagcaacgttctaccaaaaagagcaccatgtcaacccttatgttgacatgccaggttaccaattcataaccccactatttgagatgcctagtcactgtcgaagtcacattccaagtaaggttatgagggtgactagaattgcgcctggcaatatgaaccataataatgaagtcaaaggtagcatacttggtcgccgttactattggcaaaaaaacgtctttatatacatctccgcaaacgacaatgagttgtcaatgggttaaaagggaaaacaagatcagttgaacggcaagaaaagtggattgattctgctattgcaagtaaatctaccgcggagcagcaacgggagtccaggcggcgatcttgggccgggtgctagagtgacgttagtcgatacacgggaacgacagcaatatcgcacataggaaaattacacgtacgtggaataagtcttgaatgcagcgcggctctgggtcgggttggggcggggctcagcgagctcccatggacggagaccggactgcatgatcttgtcggcgtgcgggggcgcgtcaacgagataggagatccaggcgtgccttaataaggtcagttccacatcatcgcaggtacatcattgacccagtgtctcgagagaagcgcttaccagccaggctggatctgggatgcgtcgaattcggcgtccttgtagtcgatccaccgtgttcggactaagcggagaagtaccattagaacttcatgtttgaatgtgatagtatgaactgaagagtcttcttacgaggcaattcctccaggttctcgaagtatttgtttccgtagcggtcgactccgatcagagttccggccttggtatcacctgtagaacgtgtaatgttagtcaactgctgggcagatatcgatagggtggaaacgtaccaatgttctataccacagcgaacaagggcataggttagtctcgagctcattcaattgatctgctgttccgggggaggcgttcgtaacctacctgcatctggtgggcggcatcctgtacaagtgtgttaggaaacgagtttctatagggtatagatcgcaattatacgaaccttgaagccgactcggcggagattgcgcagcgtcctcacaatagtcgacatctttgctggtgtattgtgctagagcgaatgggatgcgagagattggcgatttgaggttgcaggagggcggtgtgtttgcactgtttgcaccctgctctaccatggatatcccgattcagaaaaccctcgatcttgaatattcagacatgttcggtcgcattaaagggcagacgctttgttgtgctgggcgtcgcccagccgcacgtcggagactgtgtgctcgccaattttctgcgcatgctggtacaggagctccgactgcagcatctgctccttcacctctagcaggaatcaccgcggagctagaccgcattgctccccgattcgaggtgcctgcgtctcagattcatattattgactccccggcccatttctactctacattgaaggtatcttctgttctgtttgtctcctcgatataatttggaactaactggctgttctgcagaataaaattcgcaatgcccggcggcgcatttacctctcgaccttgtacatcggcaagacagaacacgatcttattgacaccttgagccaggctctccgcggtaatccagatctcaaagtttctattctcaccgacgctctgcgcggcacgcgggagacaccgaatccttcatgcgcttcactcctttgttcgctggttgaagagttcggacctgaacgagtcgagattcggatgttccatactcccaatttgacgggtctgagaaaaaaatggatccctcgccgcatcaacgaaggctggggcttgcagcacatgaagctatacgggatagacgacgagatcattctatcggggtatgttatctgcgaactggtacaaacatggagtactaatatatttgcagagcaaacctatccgacgaatacttcacccaccgcctagaccgataccatgtgttcgactccaaggtgctgactgaatattacgctcgcatccaccatgcaatctgcagtctgagcttccaggtgctgccggaccctcaagacaaatccggctatattttggactggcctgccacaaacaaacccccttctccgcttgatgatcctcagcagtttatcgcatattcttcgaccttcttaagcccgctcattcaggctcctgccaacaaacctgcgcttccctcctcgtcaagtcaaacatatgtataccctgtatcgcagtttacttctctcctgcaacccgatgacacatctaccgaataccctgccgtgacgaccattctccatcttctgtcaagctcatcagtctatgccggggcccgctggctcttcacagcaggctacttcaacatgcaccccgtcctttcctccctcctaatttccagtactaccaccgcctcgaagactcctaccaccacgaaaggtaccgttttgacggcctcaccgtgggcaaatggattctttggctcctctggaatctcgggaatgttaccagccgcatacacacatctctccgcccgcttccttgatcgcgtcgccgaggcaggtgcgaccgactccattcaactgaaggagtggcgcaagggcactgttggcacgccaggcggatggacctaccatgccaaaggtctgtggattacactgccgcgtgaggaacaccccagcctcaccttcgtcggtagcagcaactacaccaagcgcagctacagcctagaccttgagtctggtgcggtggtcgtgacgaacgatccgggtcttatgcagaaactgggtgaagagactgaacggctccagaaagatgcctcccctgtctcgagagatgacttgatgcgaacggaaaggcgagtcggatggaatgtgagactttccatgtggattgtagagaaggttggcggtgccttctaattctcttcttggtcttttgtataaatatctcttgagaataatagcgagtctgtaatatactgatggttgaggctatcagaccatctgagtcacccactatggatccaccatttctattcgattacaccaaaatcacgcagaaggacccagaatgaccactctgaaataccccatgtctatccaaggaattatcctctcaaaattctggttcggcttcgatctagatgacacgctccacgaattccgacgggcctctgccaatgcctcggtccgcgtcttcgaaacgattcacgcctcaaacaacaagaccagcgttgatactctcaagaatacataccaagatatcctgcgcaatacaaccgcaaacgccttcacagatgggaggacttcaagcgagtatcggcgcgaacggttcgggcgtcttctccagacgcacgggctcactgatgactctttcctgagtcgtctgttagaggtatatcgagactctctacgcgaaaacttgactctcaagccgggtggattgcatcttttgcaaactttgcgagaactgggaaagaaaatcattgtcattactgcaggagtggacagtccaggagctcgggatacggccttacattgatgtgcttgtgacgacgaacgaggtcgggaagtctaagattgatgggctgtttggtgccgtgctggagaaatatggtatcgccgctgaagatattgtatacttcggtgataatgcgattcgcgatgttcaggctgcgcggcaggaagggatcctggctgttctttatgatgaaaagcagcagtctcgtttctacgatatcagtgcattacgagtggattcgtgggctattgtagaaaaagtactcgtccatggagacatatagagcatcgagacataaacataacttttgctctagccatcaagagatatcaaccctaacgcacaggaatgccgtaataaaataaataataaaaaccaaacgccatgtcatgactgggagctcccgtcgtctcatatgcagtgtaaatcttcatctaagcttttcccgaaaccttgcctttcacgccttggagtcgagctgggccgagaccggatcgcacttcgtcgagcattctgataccaatggcctcgttaccgttcctgccacgcttgtgcttggcgccgtgtcgcttcgcctgtccactggtattggggtcccagctggagaggaagtcgtccatgacgttgttgaaggtgctgctgctgtgcacggcttcgccgttaccatcgatcagactaggggctatggatgatgtggtggacatgcccgtcatgcccgtcatgccggttgcacctgtcatgccgctgatcatggacatgctgtcatcaaattcgtcctcctcgtcgagagcgtagagctgctcaaccttgtcaaatcggtcgtcaaggagacggtggccggcagtacgagccagagcggacgaagtcatggagtacgcagacgggttggtcagagcacccttgcgcttcttccggcgaattggcgttccgccaacagtgaaggtggtcgacgccatcgtctgcgatgctgcgattgtaggtgcagctggtgtgggagcattgccagccttggcatcttttttgaacttggcgaactcgctcatccaactctggtcagtgggctgcatatcgggagccggcttatcaggctcgggcatctcgcctgcatccattggtggctttacagattcttctggcagttcattttccattgagcgatgagcctcggtgctgtccggttgcacgggcgctttctccgtagcatccgactcccatccctcatcatcgacttcgtcgtcgaacagggaatcctcccagtcgccctcatccatttcctccgcattagctgttaattctccaaagattccgtcagcgtcgccatcctcgacgaaggcttcgtcctccagagcctccagcgcctctcgcagccgcgggtccatgtcaggcttgaatccagcaattgcatctgggacgttctgctgatcctggtaggttggcttgcggataaaggatgaagtggtcgagcgcatatcgccatattgtgagccataaagactgggaccaacggaggcgcccgaaccataggtatctttatccacgagcgagacctgccgcagcgcatcttccagcttcatccctcggccagccctacccttagccttctcattcttggcttcgacaaagtatgcatctccgctgccgcttcccagctcgcggagatgctgcatgtaatcgtagctggagtcatcgtaatagacgccgtagttggcagcctcgccctcatttttgcgggcactatcgccgtattcggactggaggtcagacaaatttggcaatgtcttcttcgaggtgttcgatgagggcgcaggcgcggggcctccgacctggtacaggaaacggtcctccgcactggtatcgtggatcaacgggtcattttgagaccggtgaaagagctggaacttgctcgcgttcttcttgtcactaggggcatgtcagctttgacgccataatcatccttatgcgatacgtacatccactgtttgggcggcatctttgctttggtcaaatttttgatatcgcagaaaaaagggaaaaagtgggattgatagggtcacgtgtagcttatcgcccctcgttctccggggtcctcagaatctgaactgtcggagtagttagtagtatacgatgtttaggggggggggtggttcttttccagttccactctattcgtttaattttgatttgactcattgtgcaacttcgcttggaggcttgggtattcattgggctcggcgcttcaaggcccgcatcaatagtatacatattgaaccagaagccctagttatagactatattggtcctcagatatggcttcaactattttctgctcctatatttaccatatacaactaaaataaccataaaaacctgcaaaaagtacaaaacatggccatatacttccttacctggatggccatcccgccatagaggggcttagtcagcgttatcttatccgtctgaataatccaaaattcccttttcaggtgggggttgtgtctcgacttaattttttacttcctacaacttttctcgattttagggaatcgaaagccatcgccatcatggttttacctaaatctaagaaatccgtgggactgggttccagtctcatgaacgatcggttcggaaagggcaaagcatcggctcaaaagaaggtctctcacaacaatgccatccagcgcacaggtgtcaatggtgaaacctacgtcaccaacgaggcgaaggaggcatcgtgggtcaagatgcgcagtatcactgagcaggcagcgctcgacgaattcctgagtaccgccgaactagctggaaccgactttaccgctgaaaaaatcaacaacgtcaagatcatccactccgatcagaagaaccccttccttctcacccccacagaagagaggaaagctttcctgaagcaccagaagaataaagaccgcctgactgttccccgacgacccaagtgggaccagtccacgactcgaaatgaactagaaacgatggagaaacaaagtctgttggactggagacgaggactggctgagctgattgagaaccatgatctgctgatgactccattcgagcgcaatttggaggtctggcgccagttgtggcgtgttattgagcggtccgatcttattgtgcagattgtcgatgcgcgaaacccgttgcagttccgttcggaggatctggagagttatgtcaaggaaatcgatccccgaaagcagaatttgctgttggttaacaaggcggatatgttgagtctgaagcaaagagaagcttgggctgcgtactttgagaagcacaagattaacttccgtttcttctctgctcatctcgctaaagagaagaacgaggccctcgctttgcaagagaaagaacttgattccgatgatgaactcgcccagtcggcgcaacatatcgacatacactccaatgaagatgatggataccagaaggaggatacagtggaggaagaaagggctaagcttgccgaccctgagcgctcgcttgggccacacattctggacactgacgaactggaagagcttttcctggccaactccccagaatcactaccacaagatgacgagtctagcgagcccaagcgtaagactacaatcggtctggtcggttaccctaatgtgggtaaatccagtaccatcaacgcccttctcggtgcgaagaaggtttctgtctctgccacacccggtaagaccaagcatttccagactctctacctttcgccggagattatgctgtgcgattgtcccggtctcgtgttccccaacttcgccaccactaaggccgagttggtcgttaatggtgtgctgcccatcgaccagcagcgcgagttcaccggtcccgccggtattgtcgccaagcgtatccccaagcatttcattgagcaggtttacggtgtgaagctcagaatgcgtcccatcgaagaaggcggcactggcgtccccactgccagcgagattctgcgtgcctatgctcgcgcccgcggtttctccacccagggtattggtcagcccgacgagtcccgcgctgcacgatacgtcctcaaggactatgtcaacggcaagcttctctgggtcaaccctccaccagttggcgaggacgaaactccaattgacagcgtcgacttcaacagcgacctatacgacgtcgcccatcttcctgagagacgccgagctcagctcacacaagccaagattggaaagcataccgcagtagaagaggtcaccgcggagcccaccggcgacgtcgactcggaaatccccattgaagtagccaagatttccgtcgagccagagctcggtcgcacctcccgcaaccttgatacaggctttttcggctcagaaaccggcccctctgccggccgtctgacgctccccttccaggcccggtacacccaacagggccaggagatgcgcaaggtgccaacaggccgcaaagagcgcatgatggttgctcttgagcgtggcgtggatgtctccgaagtgaaaggcaacaccggcacgaagaagcacttcaaggcaaacaagcgcctggccaagggcaagcgcaacaaccctgcggatgacgactactaaaaagtgattttcttttatatttcctttgcattgttgcttgcgctcgcaggcgagtcgagggagatcggagctctccctctgctctacgaggtatcattcttgggcttattggggcttgaggtggatgaattgataaatggtcccacatatgggatttgcatgtcatgtcgggattgacggtttatgtccatgtacatgttcatgtttgttgaggaatcatctttttggcgttcggttttacgagttgaataacgatttataccagtcattcattcacttgatcattgtcactttccttccatctaagactatcaagtccaacgtaaaaccaagtaaaaccggagcaatgttcgtgcattcttattccaaccgaactagccctacatgtaaactatatctccccattaactcaaagatggctcttaggcttgaacccagaagcaacaagcaagcgatccgcctccgcccgctgccaattcaacttggcaataaccgcatccttgcgagtcttgttctcccgcttacccagctgctgcaagtggacctcatccggaccatccgcaatgcgcagcgtacgaatcatagcccacatatacgcaagcggggtatcctggcaaataccagctgcaccataagcctgcaccgcgcgatcgatgatagtaagcgcagtctgaggaacaagcaccttggcctgagcaatctccttgagcgcgcccttggcattaccctgatcgatcttgatagcagcgttcaagaccacgaagcgggcggcatcgacctcaatgcgcgacttggcaatccactcgaggatcacgccgtgcgcgactagaggcttgccgaaggtcatcttgcgctcgtcgttgacgcgggcaatcagccactcgagcgcgcgctcggcggcgccaatcgaccgcatcgcgtggtggatgcggccgggtcccaggcggccctggatgatctcgaagccgcggccttcgccgaggaccatgtttgaggctggcacgcgcacgtctttgaatgagatgtggccgtggccgtggggtgcgtcgtcgtacccgtatactgtcaacatgcggtgcactgtgatgccggggagtccggcggggacgaggatgacggactgctgcttgtaggtgtctgggttggaggcgtcggtcttgcccattacgaggtagattgcgcagcggggatcgccggcgccggaggaccaccatttctgtattggctgttagatgttgaggatgagaaggggattgtagaggtacacaccgagccattaaggacgtactcgttgccctcacggcgaatgtcaagctcgatatttgtcgcatcgctagaggcaacttccggctcggtcattaggaaagcagagcggatcttgccctctaacagaggctcaagccactgcttcttttgtgcgtcgttaccatacttggcgaacacctccatgttgccggtatctggggcagcattgttggtagcctgataagaagcaatagtcagcgatcaatcgtatcaatttgcaagacctgcccagcaagtaaagcaatgcgccagacaaaatagaataactcacctccgaggcaattttgcttttgccgagcaactcggccatcaatccatactccaagtttgagaatccagcgccctggctgaagtggttcttaggcaggaacatgttccacagcccgatcttcttggccttctccttcagggactccaagatggcggggttggtcttccatcgctgctccccctcgccaagctgggctgagaagacgatatcggcagggatgcaatctttttcgacgaattcttcgacctggagtcatgttagcgctgaatattggtgatttgcggatattggaaataaattaccagatcgagggtccgcttggcctgttcgctgacgaacggctgggcaatgggcggaatacgagaagaagcggacattttggatataagaatgattgaattgatgcagaatataagcagaatcaacggatccggggaatataagggaaatataaagagaacgaggtcagcccatccaaaattgcggagaaggtggagaagccgagtccaagtgcctcggctcagctcctaaccggacgacttggagattcttgatatctcacgacgtcaaggtaaatcggccagatctccgagattacttgtacagaagtctatttggaactatgtatatggatcagaacattagtattcaatcattgttcaatattatgatatggcaagtaggtctagttaacaagttaacaacggagtacagccgagatatcaataagaaaagaacagacaactgccattcaacaggagaaataaaggggaaatcaaagattcaagccagctataagccaaaaagatatctcttagctacccctgcttctgcagttctttcccgaaatggcagtccattcaacatcccgaggtctgtaggaaatcgactaagccctgacactgtattgttagcagcctgaattacacattctacacatatgcatatagccatgtcacaaccaagaaaagattgcgttgattccaatgtgctccatgagatatcccaattacagttccatccatccatcccataccccgtacacacaaaaaaaagagcaaaagcaaaaggcattgcaggtcatcacacaaaagaaaagaaaagaagaagaacatatagaagaacaataaatcctaacccagacctgctcatatccaagatctcgaatctgcctttcctcaatgcatccgacacagcgaccggcgccgagtaaaagcgattgaaggaaaagaccatagaagcagagtctggggggaaagaaaagagaaagaagaaaaggaaaagaagatcgaagtgaaacacctcaaaagacccgcatctagttctcaaggcccttctcggctgaagattgctcgtagctcttcttgccgagcttggcgaacaacgattggggcttgccggcactgcagttgagtaggttagcttggattcgattcagagtctatgtgggaaaaggaaatcacatacttcttgaaccgcttgcccttgatatcgctcaatttctttgtgcaggggctcatgatgtcgtctgagggtgagacgtaggaggttggttgtctgttatggaaggttagttcgttgcagaaaagaataataggatattttatatgggagtactcactcctcgcctgttacttttccctgcaatacctggcggtggtgctccattgatgagatgtctgagcccttcaggtcggtcttgtcgctcgcgttgctcaggtgagtgttggttgagcggtcggccaggggctgagcttgtgtggttgcgtccattttgtgggtgtgtagggatttgaatgggttaaagggaggtgtagataggcagtgatgtgtattgcgtggaggattgcgtagttaaaagggaagaaggttgacaaaaacaactcggataaggtgaaaatcgtgtgttgggtgggcttcgattgttgtccgggcaactgagtatgacgccacaacatattccctcaaccttggataattgttactgttatacaggcttgtatttatggatatctaggttttcattcaaagaatgcagataactctaataacagtcacagtaggaaacaaaatagtaaacacagaaagtgggaatcattggtcgtccaaacatacacgtaatagggtacatagaacagtgtacagatgcagaacgctagtggataaagatcagaatgcaaggtcataaagtatggctaaagccattataccatgaaaggaagtatcacagctcaggtgactgtggagtatcggtaacccgggcgacatcgtccggtgtagtcatgtccaggtcatcaggccgcccattcagtacaggcggtgtactctgagaacggggttgtggtgtccccagagtaggcacagacatagacttgggagagacgggttcttccaccctgtctgtctccccgacatctcgttctggagaagaagaagacgtaggagtcggcggggaataagcagcggtcggactagtagcgctatcttgggacgagtcggagaggtttctgcgatggccaccgttctcacggtatgaggacgaagtcgggcgtgtcgaccccgggctagccgatggtgtggcgaaaattggagatgaagaccgcagactgtaggaccgagcgaccattctttgaacggcagggaattccatatagttgcttcccgacccccgtgagaacagggcgagggcaaagcagcagaggaccatgatgctctggatcacggtgactctcttttggaaaacgagctcgtctgcaagaacaccgagctggccgctgagggagtggacttcttggtggtactgaatgcgctggtgctcgaattcaagagcaacagacttccagacgtggtcgtactgctcgcggaattctctcaattcgttgagaacagtgacgttgagactttcaaggaaggtagatgtcttcgctagctgccgcttctcaaccttgttgaacgcatcgcgcaagatgcgagattgttcctcgatatagagaagagacagggttgagttcgactcgagcatctggagccgcttgtggacggacttgaagaaggattcttgggtcgtgggatttgcagatggcggttgagtgttggtaggtcttgtcgattctggaagagggctgttctgctcctcttttgggttggtagtaggtttccctgcggtctcggatgtggcgttctgctgagcaggctcgaaagatacgcttgaggcatccggagcggccacgacacttttggcaggctcgccctgttttcggatatcctcagcttttgaaggggcgggtggtgcgacattggtcgcggagggactacctccaactgcagcagtagagttctgtttcggtggtggattggtctgatccgttgtggctgacgacgatggagtcggaaaaagcggtccatcatcaatgctgcatgtatctccatcattatgcgtcgcaaaaggcgagacagcctctgatggagggtttggacaaatctcctccactgtaaggctaggttggctaggttccaccgcaggaatagattcctcgactggcatttccacaggcttgatctccaggtcttcgggaacctgaatagcttcactggcctccaactcctcaacctcaacgtgatcagagctctcgccatgcttgtactcttccatcatggtcgtaccatgcacccgaatcaagctgacggggcagaagaactcatgcccatagtgcgtgaggaactcaattctcagatatcgagcccaaataagcgagttctctactgcgaaggcttgcacctcacgagtgttgcgtgcctcatacaccccgagttctttccactggtctggtttcgcgggataccgatcggagacactaacccggaacgtgtggaagatggagctgaagaactcatagtttgcaaggacaaccgtatcaaccagaatatcatcacacatttccagaacaagaaatttgttctgcgcgcgacactcattgagcatatagctatccttattctcaatgagcacagaagaagaacccttgctttcaggattcgtcttcaagaccgtagctgcgcagtcaaaggaagcatagttgaaccgctctttgcaagtagtgcccgcatccttacgacgcgacgcatctctctggagcgcaccctgcccttgcacatccacattgcctctgccatccgcattccccgactgcccagcctcgcgagacgggatatgcgagccccaagcggtaggactagcctcgggcgtctcagcgccgaacccaccaaagtccaactcgatctcggcatcgtcgcccagcgaatccaaagcattattgattccagtcggctgccgacgatcttccttcccagcagccgcagcgcgtctgctccctccaacattctcggctgattgtccgaccttcgctaggttctgcttcttccagtcctcaaaagagaggaaattaccaccgtctaatagcgagtccgtatcttggtcctgttcggcgctctggtcggcgatcgttttcgctctctctcctggcgtcccgctcgggattataggtggattcacgaccggctcgttggctgtcgcatttgtatcgggcgccgaggcaaggtagatatcgcgacccggcccccagcgcgtctccagacacggcggcagatggaagagctcggactcggtctgccaggtactcttcgctggacatgtcgctggtgttgtgtggtgagcagtttgcgccccgttcgggggtggctgggcggtcgcattggagagcgcgctgtggcagagagccaaaatgatcgaggcgcggtatatccaaaaggtcaatgagggtcttgtggtcaacatgctgtcgatttggtgatcagatactcgcatgtataactccctcggtgagttcaagctatgaattcgacctgcttgctatgcgcatcgtggctgggagtaaaggagtcggcacgggaatttctcctaagtggtatttcgctatacgtgggggaggttgcgattaagcaaaccctagcttggcgacaagtggcggtctccagaaagaaatggatcgtctggtataaatggcaggtgatagtggaccggtggcatctcggccacgcgctgggcctgaccgcctttcaactcggtgagagcttcagggctgcaacgttcaggattcaatatacaacttagttagactacaactacaactacagactcatcatctatgaattacagagaatcatattcttcgtggataatgtttgattttccctttggactgttccacgaaactagttacagtataacacaatcaagagaaaacggccacggtattccaccacgtaggcaaatcgacttcaccgcaactcattccacctttccctgaagcaaccacgtcaatcgtgtagttcgtatgaaagcctctcgccagaattaaatatccaccagcgcgttccgagccagccttctaaccttttgtagttgtgtatccgtcgtctccgccagtgtccttgatcctcggtctgatattgtacaggaagaagaaaaaaaaacagtgtggacgaccagggaggatgatacaatgcacgtggcaatgcaccgttggggacggacggaaacagacgaaacacccaatccgagaacaaagagacataagacagaaagcggaagtttattttatcgtgggcatttttgaactttttttcccaactgaatcgaaacatgcaagcagacatcaaaatgaggggagagtatagggtaagggtgagtgaagttcgagtgaatgtcgacaaccctagaagtgagtctcatgccaaccaccgacaagatcgagatcatcgtcaacgcttccatcaagaggaaggaagctgctggggacatggctacgccaatcctgctgttcgagcaaatggcggcggcgaacctcgacaggcgatgcgggcttggacttgccctggtggtatccggaagtacctcgaccccaatcgtgtcgccgagtattggcagcaacactcttggggccaaacacctcacgcgacttgcggggcttacacttgtgcagttcgtcctcgggcttgtactggcgtcggacttcaccgagcatggaccacttatcggcccgagacggctcgtgtggggagctccgcatggggcggggcgtgctactcgacgcactggagtcgctgtcttcgtccaaggaaagatcccccaatacatggggttccatcttcagatccacatctgggccgtgagagcgatggttgggggaagcggaggccggctcgcgcaatcttgggagggcagctccctggctctcttggctccagctgcgagagttctgctcccgtcgttgagccacagcaagatcctcattctcagactcttcttcgtcccacatgtcgcaccaactctttgagatcttgtcggcacctttgttaccaaagaccatcgacaaggaagggagcggcttcgtcgtgtgagacggcagtgatccagtgatggaaaccggatcagagcgaggaagagacgggcccgcacgcttgcggagatcatcacgcttacgaagattgagcaagacaaaggattcactgagctgggagtccaaaacagaagccactgaaggggattccatgcgagacgagaaccacgaggttcctgcagcttcggaagctgggaacagatcctcggtgtagctctcgttgtccggaatggcagagagttgtcggatagcctggggaggggtcgactggagcgccttggcccatgggaaagcatctccctggttgacatatgggctctggagagatggggtgcgaagtggttcgcggttggcgctggcaggaaccacctcgcggtcctcggtgcaaaactcgtcaagagattcgtcgtcggtagtgaacgagaccgcgcggaggatgctatcacgcacatccagcaaagaccgcttggagggatcaatggtcaaggcatgagtcagaatctcgtacgtgtcctgcgacatgttggggaagatatcgaaaagcgactggcgatcccgcacatagtcggcaaagagtacatcggactcagtgggggtaacgaatggattccgagcaaacagaatgttcaacaggcagatacccacggaccagatgtcggccttggcgggggagtatcctgtcgtggtcggctcatattgctcgggggccatgtagcggtcactgccaacacacgcctcgtaacaccacgagtctttcgtagcgagaccgaagtcgcctagcttcatggaaccgtcctgtgtcaggaagatattctccggcttgatgtcacggtgatacaagccattggcatgcatgaagtcgacggcactaattagctgcagcatgaaatcgcggacgtgctcggtctccagtggaccacggttaaggcggatggcctcgtataaatccccattggcacagtactccaaaacaagatatgtatgagtgtcggtgttgaacgtatgaatcaagttgaccaaattcgggtggaacccgaatcgtcggtgacactcgagttcttcgaagccggaattcgttgaggccttgatgagacgtttgatagcaacatcctgaccggtcttggtatctgtagccaggaataccattccaaaagacccatggttgagtggggccacggttcggaaacgaccatccaaaagttggccttcaacgaactcttccttcaagcactccatggtcgacatgttggcctgatgatccaaaaaaggacgaatgcagagatgagatgaaaagggggagcggactgatgtaatgctccaacaaagagatgaagtgaaaacaggtctatgaaccgctcaaagaacacttacgcttgtgaagaatgcgtcgaagtgtgataaacaaaaagcaaccaggctaatgaatattaaaaaacaaggagaagaggtatcaggctcgggatccgaaggtaaatagagggcgagaaaagccgggtgtcaggaggttgagatgaaagggaatcctgacaggagatgtcatataaaaaaaatgtactggtgaagttgatagacagatgaaaagaggagagaatggaggcgcagaggcgtagttgaacccagggggttgttgatgctaaggaaattggtaaagaccgttatgtgctcatttgtatgtcgtttttcgttggttaacgggaaggggtcccaggtggacgacacgaatgtgtcaagaaatggacaagtggttggaaagtcggcctgataccggatgaagcgaagagagtcgagttaaagcgctgcgtaatatcgtaactgaaaaaggtcaaagatgtatagggagaatcctgtgaacaccgggttcaaggtcgaggccgtgactcaagttgaagaagataaataattgagattagtgagtcatgaggccaggtagtaatgttggggcaaattggttgggcgaattgagggatccggtagagtacccttctaatccgagttggaaaagcagagatactctatgccaggttgcccctgaggtatgaaacttcgggagtgctctcggaccaggctcaaccgaagaaacgtatgattgaccacaacgcagcggacaccttcgtgtggattggagtgacgaaggctggaggtatcgatagcaaaattgaatccgacagaccgggatgaggacacttttatcaagttgaagaaagtgagtcacccgagctcagggtggacccggaagacggaggaaaaggggtttaggacgggagaggtcgagagtagtactctgtcaaaggtagatctgaatccggccttcgaggcttgaagctgtataagagtacaatcgtccggggttggcaatgtcttgatatagatggcaagcagacacggcaatcttgggaaccttgggagcgttggaagtaataggaaggtgacggagaagtgatgcgggagagatgattcggacaggtaggaaaggcggaaggagagatggggatctaggagagcgaaaagaagatgatcgggaacgagatgttgatggtataaggggagagagagaaggagccagggagagttgagaggtgttgtaaaggcgtgaggggaattggagaggccatgtgattggctgtacggtgtaatacggtaagataccagtctcccctcgtggacggtccatccgtgcgatctgcgttacccaccgactttggccggcacctgcaggtcctggggccgtttccgtctcccggggaaactggtcacgtattgaaataataccggtattgacaacggggggtccgtctaggctctccaagtttcatgaaccttccaggcattccttatccttggaaagacgtcaaacgtctacgtgatcgacttcattgtcgaatgttggaatcggggtctacgataacgcgataacgtttaaattccattgttggttgcctctatcacatcatccagccctatctttcagatttcagacttccaactctctggccttcagactttcgatcctaaactctcgagactcggggtcggccacaagccagtcacaatgacgggcgacatcagcaggggcagccctttgtcttggagctcttggagtctcgtcggccgagggcggatcaaggtggcgcgctactcccaaagcgtataattgcgcagccaattcttggcagatcagccaatcagaatacatgatccggccactatttacaagctgcatgacgcgatagagtgggatggcgtgatctcctctgattggaccaccccggatacctactgccagctctcttccaaggccggtgcctatgggaaggtacgaaggtacccttccgcaggtactcatgcacggcgggcctggtttcggagtggaccaggacaaagaccagggtttggcttctcgattctcccagttacaccactcgctgcactattaacgttattctttgccgcgcgggatattatgagacaagattcgtctgacccatattattgacccccccgatatggttgcggggttctaccaatacgctatctctaactatatcagcgggtaaccatatcgatgatcaccagagttgagggagtatggagtatgttggatcggacccagttattgatgtgtccgtctccagtagtaaatggggggttggagaacatctcaacccaagaactactccgtacaaagtacaagacacgtatgttgtacttcgtgtggagcgtgctcccaactgtcatgattcccaaccacctttcagacacccacgcagccctgtcaagcggtgaagggaatgctttcgctgccaggtggtctggccttggatcaggtttgaccgcttcctgcggcctgcaaggccaaaccttgcaggtctcgaggtgataggtacgatgtacggaatatacctttggattcaaagcatgctcagaagtaccagtacgtggacgcttgaaacgatagagttgtgtggctatgtggcacgacttcggtttccggcaactcctgtgcatcacgcgacgtcccatccattttgcgtctcatcaccccatttgattcattctcggagatcgcaaccctcccaattgaattcctgggctgtgcatcggatatggacataaccagctcgtttcggtacattatctacgaatgcattgtacctagcatattacatcgctccgatatagttgtacacaagatactactttgaatccattgcagtgagatctgcaggaagtaaagtgcacggctcagtatctggtcctgatctccccctccatcacacatcagccattgccgttgggtccgtgattacattctcgttctctgttatgcagtctctcgccgagtataacatatacgtcaataacgtccgtacacgatctgctgcatcagtacatataaaaccccctctaagcattcgtcatctacggagtgttgcatcaaaggaaatcgatcagcctatgacagtcgaccccaacgataaattatatacaaccgccctatcagcccctagcgatgaattgaaacgtgtctcttacacttaatacttgggcgcctgcatggttttagccacgtacatgactccatattgactaccatgataccgagggggctggagttatcttccgaatgtggtatttttgatatgagatgtgatatgagatacgggttagttacctatcagttcgaaggttctacaagttacggagtagactcccggcgctgggggaagtatcctccgatagggacgataagagtccccagacccgaggcagaagagacaaccttgggcgtaaacaaataaataggatatctacggtttgaatgaatcatcattatcagagacgacggtatcactaccataccccgcacgatcgtcattccatgatcatatccaggcgagttgagaattttgaatccgtctcagtcggtatttgaaggggtcatgatagtcgtgctatgggaggccaatgatgggttggtaaacagtgttggacaacatacagaataggatacatgcatacttcttagccagtgtgtatttgatctaatgatgagatcactcttatcatgagaaatgacatgccaagccaaaagagggggtcagatagccgaatagactgggagccacttccccggattttagtctcagctagttttcctcaatcgggctaacctatattataccaaatatgtagaaccctgtgcatgccgagctattccttgaccttctatatacacgagctgaagccaccagaactttaacattctaaatattcaagtccgagtgcgagctcaatgtgacttgagactaggatatcttaaaggacccggcacagtgcatatggcctgtgcgactacggagtacagagttctacatgtaaatctccagggcatcaacatgcatcaacattcatctgcattgcacgatgtcctttgtacatcgtagggcgatcccagcctcctgtaggtctctttttctccgtgtgcgactgtgcgttgctgcaggaaagaaagcagagattggaattttcaagatcgatgcaagggtccttattccctgaggcttttttttttggggacgcatcatgtgagagaagtttcttgctatctcagtatgttcatgcttgacagtttgagtttcttcgtacgttgccgagtcaacacgggcatgttgtgtcccctccattttcgccttacagatcgagtctgtcgccttctctgcggggggaatgtgtcggcgaattggctactagatgtgcagtatattgcatattggctttctacggctccgttgttgtagttcatccaccctacgttgttccttgtatgctctgttcggatgtcccatgataacattatagctatcaggatgtatattcaatgctaatataccccaaaccctgatatccattaatacagattcggtgtttactattaatacggtggcaacatatagtacaaagtataggaggtccaaaacaaaacaccgtcctcggcctcctgaccccatgccacattccataagggtcctgccaacgtcattccaccctgacatccccctttccgttccaggtggatcattgttacacttgagttaataaatcccaaatacagagtgtaataaaaaagacctcataattgagtgacgttgagagacccattattatttgaaacgaaaaatgagtaatacagtggagaccaggcagcgccagatggacctctgagggccatttattgcttctatttacagattatggagtacttcggatggtattgggactcattgagctccgcttgcatctagactctgtgttcatctggtcatggcgatgcgtgttgaacttcgagtctgtggcgagtggaatcggtgggagcgtactccgtacaatggtcgtgttgggaatcggcaacggattcgcgctctgtctcttggagttgggtctggttgaactgtgaatatgtatcagccggataacggatgtacggagtacgagatacatcctcaggtgttgacatgatgttgacattatgtggatctgattgtacgcttggccacgtaggcggatcacataagttgattgtctgtcttcggaggcgaatttatatttgttatcttatttggttcgtgtagttaaagcaattgtttattctggttgttctagttcctatgtcgaaaccaaaagacgctggttgtttatatttactcggtacctgaggatctatattgtacgatatatctctgataaccacttcatctcttcaacatagaatctactaccaaaacatatctatagatcaaaatcttatacaccctagcacacatacatagtagtttgacttatatcacccattgaagtcgcgacggaggcgatgattcatagcaggatggcctctgattggccgagaacccccagggttccgcgataaaaaaaccgactgactcaatatcaaacccccaggatgtcgcgagaaaggtccattctcgaggatgcaaaatgagcaagcgctcgctcgaggagtccagggcaggtgcacatatgtcgcccgatcccgacaataatggcttgctgcccatccaggacctgctctctcctggcgaggaggagcacggtcaatcctccggaccctccaagaaacccaggaacttcattgcgactgtcgtaagtgcccaatttgcctcgcctattttttccgcgacgcgaccgagtcatccggtgcccgctaatcccaggtaataggcgtgtgagacttgtcgcttgaaaaagaccagatgcgatgaatcgcggccgaggtgtggactatgtaagtcgcttggcctagagtgtgtttataatgagcgtaaatcttcaaagtaagtcgtcctcggtggttttcatttcatgcgcttatacgatgcagacgcgatcaatctctcacgatgatcatgagcactctccatcgcctggagacaaaattggaaaatatcccaacgtctatcttgggtgatctgcagtctcttcggagccaaattcggcctgtccgagagccgcagacgcagctatcgcctgcctttggtggcgacaaccagcccctatcaatgctgtcctctatcggggacaacttcacgcccgcggcaggagatggagatgactttgaattcgaagagaatcaaccaaagtcagactctgcaggccggatttctatttctttcagccagcatggtgtcatcgtctggcctggagcaagacagatcctcccgaagcaattacttgccgcttatgagatgctcgggaaaaactatgtcattgaactggaatcagcacggcctccgctgccgatgtttaccagtccctatccgttacaagcgggagatcactggctagaaatacttccgttggcaatgatcaggggtctggcggatgcgttcttcagtgtttttaacccctccacgccgattatggacaaggggttcttcttttccttcactcttggcacggccatcgagagtggctttggatataatctcgagagttgtctagtgcttaacgtgctagcattgggctgtcccgcggttctcgcctaccaggaaggaaactatcctttgccgggtactcaggcccatcgatttgaacctccagaatggatgaacgtggtgtacgaagaacagcctggactgcggttctttaatgaggctcgacgacgtatcggcttcttgatgtgcgacaacgatatccagagttgtcaattctaccttctttcctcgtacgtatatatgcccaagcttactctatacacagattgatactcatcttctatagtgtatattataaccagattcctcgtccgatggattcctggacaatggtttctcgcgctgctacttgctgtctatcaatgttgataaagtgagtcctgccctaatcaaacatctggtatgatactgacgcatacagccataatgtgaacttcgatgaatgggaaggcgatatgaaatcccgcgtatactggaactgtctaatgaacgagaccatcctcgtacaagagctgcacctcccaccaagcggcctctcccgtctcgaagaacaagtcccaattcccaaattcatcggcttcgaaacaaccggctacgcctcgaaccgtttcaactcatccagcgtagtggacgactcatacttccaatatcatttcctggcccaggtagcccaccgtatcatcctcacgcggatccgccattcactctacttctactgtgagtaatcccgccaatccacccagacacccaggcaccctctaacacccaccctccattagcggattcaggaacattccccctcccagcaataaacaccgagctacaccaccaactagaacaatggcgcaccaacctcccaacagcaatccaattcaacaacgccccctactcatcccacccaaccccagcaacaccctccatccacacctccccacccgcctcagtagcatcgccagcccacctctcctccccaagatcaagacccacagacccgaaccagcccctttcccccgcaatagcagtagcagacgccatgcttaaaggccggtacatgatcgcgcgcttccacatcggccgtccgtatctatacaaagctctccgcatcccgcacctcctaacagacgaagacttcgtgcaagtgcgcagcggtctgcagaatgcaatggactggccggttactcagggtatcttccggaaaatgaagagctgtattccgattaagtttgctttttgctcgcagtgagttttgcttctatgttttcctttgatgcctaagactacgtgtttgggaatctttaactgacttttttcttgaagattctttggtcagatcttgctcttctattgtatagctcattcgccaagtgcccgtctccgtgagacgctaccggatggctgggaacgatggaacgaggagatgctagggtttttggaggactgtgctgtgcatagtccagctgtcacgcaggatctggaactgttgcggtatctatggcctgataattaggtgttttgcgttttgcgttttgcgttttgcgatttatgggatggggtatattttattttgcgagagatggattctgttcatttctatctctacaactacctttatggcaatttgtttatttgcgcatggggctgagtagattattcgcagtggatttgctattgtacgcatctagtaggccatgacgtgcaactggacaactattggaaggcaccactcgatcccaaacaggcaggaagggactggcaagggactgccccaaggcaagagcgttcctgggactctgcctgaggaaggaacgataacaaaagtgggtataaattgaaagttaaggcagatattgtaacctttatttcatctttcacgtgtgtacaagatcaatgtttgaatccgaatcattcagtatagctatgtctatatacaagggctaggcctcatttatcatgtagcacctgcttaagacaaggaagggtattgcgaaaaatcaaaacgaaactagaacaagtgtttctgcagggatattgtctgaacaccacacgaacaagatactagacgacaccccatgccatgatgcatgggggatgcatatcagagagcccaatcctcggccgtttccgattttccgatgaagggtttgtcaatttgtttgatggcatggtcaccgcagaggatactggaaagatggttagtgagatatactaataagttaatagggaaaacacataccaggcttcagcgaccagcccatctaattccttaacaatctcctcgcgccgcgaggaagagatatcaccactgctgagctgcgcctgcagatcccgaatatactttttcttgccaccagcaccgtccaagacttccctacccaggcagtcactgtggaaagaatgctgacaggggaagacgaagaactgacggctgagaactggtagcgagcagatccagcacttctcacctggctcaacgatggcgtagcgagtatcgagaccggaaatctcaccgcggatttggcgggctgtcagggctgagttatccatctcctggcggagcgagtcaatgtggcgcgagtagtcctctaaagcagtacaaatctcatccttgaagtcgtcgatgacgacaaaatcggggaagaacgggatcaggtcctcgatgcggagcagctcgcagcggcgcaggaattcaatcgcctctttgatacctgtgcccggttggcggatcttcttctcagcgacgaggagccatagctttttgcggagcttgtcgttgccctccgggcggtctgcgacgatcgcagcaagttctatgtctttgtgctccagggctagctctacagcttgtagatactgccccattgtgctgtatatgtgaatgcatgattggattcgttgattctgaatgcataaacgaagtgcgaagtctgcatcgtatggagggtggggtgacggttgcgattggagataagtaagcagtccagcctcagacggtgaaggactggaggcatgtattgagataagggtgttgtggactgctgcggatggatttggatgattgacaatgatgaagtttagataccggacggcttggttctggttgagggaggagacgatggctgatttgttgtaattcaacaacgcagggatcagtctctcaggatcaaggttcgtttgtcgcatcaggatatcaaccaggtctgtcggcttgtgtgtcatgagcacgctgctatatttgtagaacacatcgggttcgctttgccgctgcaagaccttcaaggcttccagccatttctcgcgctgaatccagtacgatagaacatagttgtaatcgtttgtagcggttgcgaagaacaacaattcttcctcccgcccgtggctgctgataatatcatatactgttttcttgtccaagtctgctttgtggctgttcacgaactcttggaaatcagttcggatgctgccaagctgatccttgatttctccagtgcttgtgccttctgccaattcggctttggtggcgatattgtcatcgagagaattcaacttcgacatgaacagttccacaagccagctcgcgaccattattctttgcataagcgaggcctttttgtatgttgccagctgagagaggaggtagttccgcaaagcatcatgctctttatgatcaatcatggtaagacaaacctcctcgaaccctttactgctcttgccccatactttggctgcctcgaggaagttacccttagatgccaaaaaatcacccgaagcagtcatgacagcatctcgctgggcagcacctcgtgcatactgaagggcctcatcgaatttctgctctttcaagaaggttctccagacatctctatcctcatcacctgctacaacttcaaaaatggcctggctggtgaagagccaatacgtgtttttggtgaggtcagtcaagaggcccagagcgctttgcccagcttccaacacgggttgatcgtggacaacctcctggctgagacgattgactgcgaccactctgcccccaacaagtgctaggacatgccactgagacagagtcatggcagaaatggggtcttgtatcaatttccgccctcctcgcggtgattcagaagctggaaatagcgagcgcggaagcatccttgccgtcttgaatggaggttccgacgtaagttggccatgatatatcccctcggagctgagccacgcaaactgcttttcggtataaccctcggcttggtaaccctctgaaattgtgggcgaaattaccagcgaggatggcgcagagctagacgcatttggaacctcgtggatcactggcgtctcgcgctggaaaaggtctgaatacacgccgctttcccttccatgctttgagactcctgtccggccaatgaaatgaagtagcttcccataggttgccacaagcactcttctttgatcaggcgtagaggacactgtttccgcggcgattccgatcaccggagaggcacctggcacctggtagacgggggtggtatacttctcctgccggtagctggagggttcaatataagtctcgtagatgttgccatcagtggcaccaatgaggatttcccgagtagatgcagtcggtaaagacggattccaagcaacgctttcgattgacacgccttttaatcgtgccaagggtttcggttgtcgcgacggtgactgggcatggagatagtagttttcgccgagggtcgtggtgataatcaaatgagatgccgaagggtcgaggaacatgcgccgaatcactcctatttccgaggatttcttagggagatcgatgtctattcatgagcacggttaggtcaacatgttgtggctggcatctgctgcggggaaggttcggaagtttaccttcgacatcttcaggggaatcaagatcgattcgtagaatgcgattggtcgatagggccagtacaagcacgttgtttgcgacttgcgctgcaacgaagtccgcagcgacggcgaaggccaactgcactcgttcaacgtcgaacattgggagggaagagctcggtggctccattaagttgctcggagcaacataactgctggatgggtccagcgccatagtgcgctagctgtaggggcactatgtcatgccgctcatagaagagttgaggcaagccgagggttctgcgagtttatgcaggacggaatgggctcttgaggtcagccctgatgccttgacacctgaggccaagcactcggatcaccaaatcagaactatacagttaactagttacgcagatctataacaaggcaaaataagcaaatttgtagacatctatgaattctatcataaattgcaagtactaaagtccctccgctcatgtatcatagggtatcatcgttgctgaaacatgcgacatctagactgtggactgggtatctcaacacaaaaaaaaaaggaaatcctcgcatcaccagcctcacatcactacacattcccgatctattttcctgttcttctccttggatttctccttggtcttccctttattcctctcgcgatccttcgttcggcctctcccacgcttctccttgtgctcatgtccgaatttcgtatcgtccacagtgtcatcaatctccaatgcggactcatcctctccattttcttcagtaaatccgtcgttgctaatcttatcccgactaagccgttcagcaaagcgtgaaaaagtggcactgattctgttttcactcgtttggctgccagcacggcttccggggctacccctggtcgatcgagatccaccctttgtgctctcctttgggcttccttcttccgtcggtgccagcctaggcgatgaggacggaatagagcgcggctgaagaccagctgggttactgatttctgagaatgccatgctaggtcgccttgcgatactggctaatgttggcgcattattctcgcctggccctgtgacctcaacacttggtcggtcagaagaaaagtcttccatgctgaaatctgtttggtcgcctagtgtactgccgtctgacgcccgagacgatggtgggttcggaatgttgggcgcagctgggtctgcgccgatcggaagaatttggtagaacagaagatagggagactcggtcttcaatgcttgatcaatgtcaaccagcgtcactcgttctgcggcgagatcatcgaaccgcatccagtgttttgatgtctccgaggattccgggcctgtggcagaattggggcaactggtgcctcgaacaatggaaatgtaatgtcccgagtcaaccgagttccccctgtggcaaaccagagcctgcaaagatagtttaaagctcccataaatgggagcattcgcatccatgttgtcgtcttggatgaagtgaggcaggccgatctcagttgggatatcaatgtgtgtattgagtctgactgccctcccatttggcaagaaggaatagcgttttaggcacatcccaagaatgggccgttttgtggaaaagtgtgctgcaacttgcgcatcgtttgttggcgtattatcggtataccatgctaagcaagattaggtcagttgatgcaaaacttcaagaacaggacgaaagatgacttacgtatcaaactgaagaattgccacgcaggcatcattacctctttcttgtatgaaccccttcgctgttgcgtatctccagtagtatcttgatctgcattggtaactttctccggattcggatctgtctttgtaggatcactatccggaaagaaccgctctcgaacaatactaccatttcgacccggtacccgagatgccgcgagggattcagtgaactcatcaaacgatgaccagggggttggcttttcgacccgcgacgtagttgattgaacaggagacatagtgggtgtgctctcaacctccactatttcaacatgtgaagtggatcccttggatatggagagtgaatccattgaatctctcgcggtgttgcgtcgttccatgtgtcgtttgacttcaatgatgttattgaaataagcttccagacagtcttctagcgtgagtgaatgtccatcggttggctcaggcgggatggcaacctcgagaagtctctcattgatgaacttatggtcatcacttgcatcctcctttccagtatgaaaaatatccatcttcaatgtgagaagcggcagctctaactttccggtgatgaaagtgaatgcttccgaagcatcctgttgctgaagtttggccgcatcttcccagccacattctgctagggcatcctgtaggtgttttgtctgaaaccattagtcaataccagatatgagcacaataacaagtgttaaactaaccatatctgtggtgataagcttccccgatcgtaacagattcacccatagccttagaaggatcacaagctttcgacgaggctcatcattaaacgatttgtatagaatggcttcaaaacaatcgagacgggcaaacatggcgaacaacaatgcatctaggtagcatgtgacaccttggcgattctctgcacctaggagcttggtgttgggtgtgtaattcctgatgatgccctcaattgagtcctctagtagaagtagcaggccgaatgctttctctgtatcgccttgtgtagcttgcaatgcataactaatgtgatcttcctgtaaggcagtgattcccagttgtttaattcgttgagcaagggctttgacctagatgtgaatttgcaacgttagacaggtgcaagctgaccgttgtgcttagccataccttcttctgatgatcgtgattatctgccagtgaagtctccgacttgaagattccatggaacagaggacgtgaaaggatatgggatgcctaggaagtacagaacattagccaaagatcttgtgtttaggcatcaaagcgttcttagcatacctcttctttgctttgcttgttcaacttattgtgccgatcgcgacgcgtcaggaaccgatgaattccactcattatcacggatcagaaaaaagaaaatactcttaagagcagagtttaaagatcgaaacgaaaatcccatggagacatgcgggggatcatgagaccggtgttccgtaaactagctcacaacttagtcaaggctgcaggatttgggggaaacgcatgtataatgcatcataagtagagctctttcaaaacgaacgaaaagaagtaagatagtctcgaaggatttgaagtcgatggacgaacctctaagtgatctgcggggcagagcgggaacagagaacctaagccggagatcgaccttttgctgccctaaccttggaaagctctccaccgcctaagtccgggtgtgggcggtgacgaggaacttccagaacatttggagatatgaagtatataagtgcatacctatgtgtgtgtaggaagattcataagaaacgacaagactcatataccacttcatcctagcaaaccccaaagattgtcttgctcggtgacatgttcgtctagtcgacgtcagattcagattcttctagaatggaactattacaactatataaatgtctaatttagtggtattccaaaatatacggagtatagcataggaagtctaggttaaaaggcaggtatttacatagtatctagtagggctatgttcttatatagttatatagagccctataagctcctagtcttgtccttatagtacagtagttgttcctcgctctataattgcgtgaaccatacctatatgtatccatggataggtgtaggtattgcattatcattcataccgcagacctgctcctctaaatagccgtccagcgaggagtcaggaccctactaggcaaagattgctagcccactcatcaccccttgaggattgagtaggaatttctagccaacttcatgcataataaggaatatatcccaacaattgcagtagtaggtgcggtaataactcggaacaagccctatgtttggtcattggatttggtcaagtcttcgcggatataatcacatatctaacatctatctaaaattgaaattgggcaattccaccataacggaatatgacgaagacttcagccgagcaataattgacgatcaggtacgtatccatggatgagttacggaggacggagtagttggaggtggatatagtgcctgttttgtaaggcgttattacccagtcctcacgtgacgggattatctgcgcgaacaatttttggtaagggcccgggcttatcctcaatccatcacaccccatttttcacagaatggctgccagagagccgtgcagatacctaacaagggcattgccccgggcctcagtgccatcaattcgccctcaaggctttttctcgagccgcaatgtctctgatgaagccccagccaggcgtctgtcggaccacctaaccgagctagaaacggcgtcgtcgctgtcaacacctgtcccagacagcgcagcagcatcgttcgatccgcttgcacgagcatccgctcgcaagacccagcttccccgaggccggtaagagcactccgactacatcttcggtcatgcgcatctgcagacatgaaaacaacatcgaacatactcaatgaacaataactaactccgacaccttatcacagataccaattccgctcccccaaatacaaccgtggtcccctccaccctcaccaaccgccgccaccatccgacccctcctcccggctgttcgtgccaggcccattctccgcgccccgagcagagcagaccttcgactcaaccgtctcccccgacattatgaccctgtgctacgtgcacacgccaccaggcttcaagccgccgccgaaatcggcccgtctccgcgagtgggacgacagctcgccatatcacaagaaccgtgtcctccgcggtccccgtggcggcgacgtcctgcgcctgctccgcaagccgatcaagttcaacaacatcccggaaatcgagcgcatcacaatccacagctatgtcaagaatgccgcggctgagcggaactcgtcttggctgcacgtcgctggtattgccattcaggccatctccaatgtgcgcgttcagactttcaagtccaagtctaacgttgctccttggggtattgcggcgaaccgtgactccgtcgctgtaaaggcagagctgtatggcgagaacatgtaccacttctttggtaagctggttgatgtcgtcttgccccgtatcaaggattgggagggtgtcaaggggtccagtggtgatagcagtggtaacatcactttcggtctgattccggagaatgttgctcttttcccggagcttgaggtcaactacgatatgtaagtgttctctattctatgtttctattgtcttgtcaaggctaaccctgcttcataggtatcctcctaagatgatccccggttgccacatcactctccacactaccgccaagaccgacaaggatgcacgacttctgttgagtgccatgggtattcctttctacggcaagatcgtgaactaaatcgactacttttggtatcttattatatctccttttggatagtcttgtgatatccagcatgtaactttagagaagacctgcataatggtcgttgttattattggaatcgtgtactatggcttaaattcaatctacatttacggcgaacaacagcacacagcacaggatgattggaaagtgtcaacaggaatctttgctcagttgcatcaactataataccgagaaagcacccatgacccagataatcggtcaataaagggaatatcaccattatacgtaacatcatattacatacatgcatcgagaagacacagaagagacgaaagggaaaggaaaccgcggctaccgctaattatgggataggtgtggacaggaacgcgcaccggagcagttcatcggcagtaggccgctgctcgtagtccaggtggaaagtcatgtcgaggaaatccacagcctcctggctcacattgtctggagcaggggggcgagccttgttgctgccgatagcgaaaatggcttgcagctggctgcagtccgggaaggggtgggcaccaatgaacatctcgacaacgagacagcccaaactccagatatcggcttttttggtgtgtgcggtctgtcgcacgacttcgggtgccatccagtacacacttccctggagggatgtgcggtggatattggcaccagcaccaccactggcccgggcgccgaggaggtgggatgcttcgacacgcttggagataccgaaatcggagatcttaacaccacccttgttgtcaactagaatgttggcacccttgatatcacggtggatgatatcccggccgtggaggtatgatagaccggctaagatttgtcggacaaagttcttgacaaggggttcttggaaggtgttgtactgcttcagcattgtggcaatagacccaccaggcacatactccaggaaaatgttgagatactgatcgtcggcaacggtgccaagatattgcacaatgttcgggtgggacatgccttgcaacagctcgatctcatgcttaagagcatttaccatgaggttcttccgttggtcgaactctgtgccctttgtagcagatgggatttcaacctgcttgacagccataagctctccagtaatagcatgaagagccaggtaaacgcttccgaaagaaccctcgccaatcagagatcccttcatccagttctttggtgcaaagttatttccagccaggaagtccacaaggccatcatcctcttcttcgccatcctcggctacaatcatgctcatgcgatcgttaaaggaaccgccatctgtggccacaacactgagactctcaaagctctggcgcgattgccgcgattgattcgcgtcgtcggagccactctcaaaggagacataggattttcggttgggctcagtgggtgactcttcttgaagtggctgaagggaactagatgctatagaatcccgatatgaggattgaggtaggttgaacttggaaactgaaatgggtcgcgggattcgtactgcctgtgccactccagggccatggagccatgcatcggcaatgctgggaattggaggtaaatggggtaatggcggtaggggaggggcatctttcatacttgatgcaacgctgtagttgctcataacactcatacgactggcggcacgactcaaacgttgagatctgcgcatggtcttctcgatgttttctcggtcatgactggggaagaatgattgtaattcgtgaataatcatctcacttggaggtctctgtccgaagaacgagcggagtttagccacaggattacgttcactgttcggaccttgcgattcatcaacactggagttggatgggcggtgtcgagggcccagcggagaaagcggctgcttaatattatgccaagattcgccggtaagttgctggatcttgtgtttctggcgctggttggaattactcagagcatgctggtgggtggcctggctctcatcatatgcaagctgggatgcacgacgaagctcgtcttcatcgggctccccagcatgaatcttccgtagaatcaagcgacctcgctcggacttgttgtagccatcgcaaatctccatgagctccgattcggtgagcttccggcaatttgacaggtctgggtccagtccgtctaatacatagaaacaataatttctgtattggtgttcaggaagctgtagtttcttcaaaacacacaaaataacttcatctggtgttctgcagttccgaatatccaagaccttggtttgtccaccggtgtgtatgacacggatgacaggggagtttgatgggagggggcccatcgtgagaccgtcaagactagggtttcgaggatgggagctcggtcgaccttcgttcggagtagggggatttcggccagaacttgagccacctgaagatgggtgattaagatagtccttgcgccatgtgcctctttcggcgtcaccggcaggtggcgacgcaggctgagacagcgatttgctgttcagataagcatcatcagccagctgagatgtgcgtcggtatggtagccgggaatgagtatagcgggaagaatttgacagcgccgtggcttcgagcgcagctaaggtattctgtatcgaagatcagcataaagtagaagagacgaccgatttatggcagacagacacccaccatatttttctgtcgtgacgttgctccggatttgtttctgagttgcttgatagcgatgaagatgcgcacccggtcgcccaccttcttgatgcccatctcttgcaggatcttttggtcgcattcgagtaaattatccccattgaaattgttggctgtaaatcatcagtgacatcctgggtgtaaagtcgggacggccgtgcgtatgcgtacctctaaatatcgactcatattgcccacatttgatgctatgaagccatgagaccactcgtctctcatcccaggcactatcgatagtcagaatcactgcggtatctcggataatttctcaaaagccataccggaccgatgcaagctcgtctaacccctcggaaagctctgaccttgttgggctgacaaaccccaccccatcctgggctcttgtagccgtcgccggtctttgggacgaatttgtgtggtatgcggtcgatgattgcgacgcagatacacccgtaggtgcagaatactgcttaggagccaacatggctgagccacctgggcaggtcaagcgaatgactcgtcgggttcacgtgctaatcgcctgcgattgatcgacacagcgttctttccttcactctcggggtccttcctgtcaggtcgaacgggggatccgaataatgataaggcgtcggtcaacacataacctcggcttcctggtattcagtcagcggcatgttccaggtggttttgattctcactcgccccggcggggggttgctgaggggtcgggagagtgaacgacacagcagagacaaccacaatgaatattgaaagacaccgaccagggtaaaacaatggtgattccagcacagcaggcgaaatcgaaatgagggacctcaccgatgcaacttaccgtctagcttttttgaggggcgagaccggggttaggtggtctggatcgggttatcgagatcacaactccccacttgggaacgagaaggtggttgacagggataaaaatcgggaggaagtcaaaggttcaagagatggagtttcgggttggagtttggaatatgaaacctccagggctggaacaccgggagttctctgactaaggtggtacatgcagcccgtatcaagggggaaagctaggcccgatgttctcctccacgcgtttctatctctgagctgtctcatcctagtacccttcggtgttcatccaaaaaaatacgtcttgggctacttagtggggcttggctatacataatagctgctttgatgacttcacctgcgcttgcagccatgaagcaacacgtataattaggcgccctgctgtatatattagttggttcgtttaacgatatataaatctattacactggtatttcccctgctttgaaaatatatacgatgtacaacctctctctataggaagtactcagagactttgataaggttatgagctgtagattatacatattgctctccacccccttgcctaacgctatagattgtcggtctctagaggttgtttttgccgatatattcagtgacatgaacactagttatagacgagctggagctagtaccatatccttttggccagctcagacagagtttcagatagagatcacctcaactttcagattggctgtttcttagatcagttccacaaatttccttccctttaagcccaatatcggcgataaggtactaaaatggaaaggtgagacacacgagcccccactgcgatatgttcttattttttccttttccatagtagtagtggtctacagggtacatctattttacgaattagtatatttgaaacaaggagaggatcaaagaacttctctccgaacgtgccgaaccaatgcttctcaggctacactttggtgtctattagggctttgattttgattggctcctcgtgcttcttaagcttttcatcgcatatggcggctcgcgttcagcgaacatatcactcattttgggtaagagcactattcactaacgggatatgacggtgagaactatggtggtagaaacacatgatgctaaggccgtggacggtgggtgggaggcttaaaaaggtgtcaaagacggcggtttctgacctcccatttgtttcattgatatatagaatacggagtatatatatatatgttctatctagctcctatggaacataggagccaccgtttctgtgaaccattgtattttctttcgtccttttctatctactactacttcatacttcatagatagggcatttagacgggagccctataaccttcacctatagtctacaaaccaagattgctctaggcataatgtctaccccgccaatgcttcagatgtactttccggcctaccctatctataccggacgactttcaatcgagtaaggctctccgcaccagtggagacccgagcgcatgcatacccggcctgggtatcagcatcaaacactaggctcattcccaacaccttccacaccgtagagcaagaggatcggccctttgcatatgtagaatgagaaataacaatctcatgtgtttgtatcctcgagcccatatagttctataacacgtgaccgtcccctcactgtgggggttttagtccattttccccgctcaaacagcccgcggcctcaaattcttcccctccctagtgcgctcccccattccaccccaaaactccaaaaacaatggaggacgaaaaatcagccaaatctaaaaagaaagctgtgactcatcggaagtccctgtcgtgtgaatattgcagtcggtcttttgctcgcttagaacatctccaacgccatctccgcacccgttgagtaaccccctcttgctcccggcttcttggaattcgtctaatgtaggacaacagatacaaaagagaaacccttttcatgtgacatttgctccaaatcatttgctcggaggtaggcttatattgcgctcaatccccggaatagaatgccaatcgcttatcaaatatgaattttccagtgaccttctagtgcgacatgagcgattagtccaccctgctgaaagtgcagccagtcgagaacaccgggttcagaatggtcacgagaacaaccatgaaataccaattcagtccaacctcatccaacccgcccatcatgagtcgcgcatgttagagcttgcagatgccatccctgtccacacccaagtgcctcctccaccacctgaagtccaggtccagactccatcgattatagatacacctcactttaatccctcatggggatatgatttgaatcttttatctcatgccgcaagccatgtcgctttggagggtcaacaggaaagcctagagtccatgagaaaaccacaacacacagccactcctacgtcacaacaacttcctcatgtccaggagagggcaattgccgatagttatggtgtagagccttcgattcttgatctcacggatcttggggaccctgtccaggattttacggttttcctggaaagcgtgggtttgtcgtctgattgggactcgggcgtgttctcgtcggtcgaggagcccatgctaccaccgagtatgacaatcgattcgaaaccgccccgtgagccgataccatcacgacttggcggggatatcatgaatgacccgcggggtcccgcggaagatcccccgtccttctcgaattttggatcccggctgccatcactgcaaccggaatctcacgaaatggacgaccgtatcggtctttccgacgagagtacacgacctgcatgggacatctctaattcggatcgccaatcgttcatttcgaaacttgaagaattttcatatgttctcccgaaaggatttgttccgccatcgcggcatgccctatcgcggttcttcgccgggtatatcaacggattgaacgagcatcttccttttatacatgtccctacgctatcggttgctaaatcctcacctgaacttacgctagcgctggcagctgcaggttcacactatcggtttgagaacagccggggcatcgaccttttccatgcagctaaagcgattttattggagcgactccgtcggcgagacagcaagcaagtgcttcagccgtcatggaactatatatccccatcatcagggtttcctacctctcgtggttcatccatgatttctaacacggcgggcagccctttccaacatcatcagcaaatgtcaaatccacccctcaacccatcaatatacacgctagatgactcagatgctcatatggaagtgattcgaacttttttgctgctgactgtgttcgcgtcctgggaacgccatccagaactcttgcgggagattctctcgcttcaaagtactttggccaggcttgtgcgcgaacatggcttgtctgaatcaccttccacctcagaacctaccaactgggaggagtgggtacggagagaaggtaacagacgtacaaagcttattgtatactgtttcttcaacctccactcgatcatgtataacatacctcctctgatcttgaacgcggagttgaagttaatcatgccgtgttcccacgaactctggaaagtgaccaattccgcacaatggcgtcgcgtttatcgcgccagacagggatcagatgtgcctttccaagaggcctttgccagactcttcctcaagtcatccatgtcaactccgtcggcacctatatccccccttggaaactatgtcctcatccacgccattatccaacaaattttctttgctcgacagctctgtctttccgcacctcatatacagggcactagtttgagacccgacgatttgaacgtactagacaattcgttaggcgcgtggaaggctttatggaagcgcacacccgaatccagcatcgatccccagaatccggccggcccaattgcattcacttccacagctctgttggggctcgcctacatccgtttacatgttgacttaggtccctgccgtcacctcatcacacaagatccagtccaaattgcatcagctctgaatgagtcccctgctatcgcacgtagcccacggctgatcatggcgcttcttcactcagcccacgctctttcaatcccggtacgactaggaattgactttgtggctcgaacgcattcgttcttctggagcattcagcattcgctctgcagtctggaatgcgccttccttctcagtcgctggctactcgccattcccacaacgcactccgagcagagattgtcggagcatgagcggaagttgctcctgtggatcaagagtatgatggatgaaaccgaaatggcggttgatccgcctggcgcaccagatatggaattcatggcgaatccgtacaaagtgcggcagcttagcgttgcgattgtccgcgtctgggcgcgcacttttaagggcaatactagctgggcgatcgttgacttggtcggctcaagcttggatgcgtatgcggatctcctggaatattaatttgattgtttcgaggtctgtcgcttgggaggttgatctttgttccattgagcagagaatctccggcaaagatgcaactgacgtctcttctaagaaaaaaaataatggcctctttggaatggccatcctaatgatcacatgtttctcttttggatgatgtctcatggagttttgtatatgggggactgggaagtaaggttatttgtgttcgatgtttgtttgatctatatgtatgtattatgacttcgtcatttgcttagtgctgtctataccccaccactgtttgttgtggacaatagcaacttgtttctactaggacttgcatatagtgattctctcaaagtaactctttacctattcgaggagtggtacgtaaagtatattcgtatatatttatccattttgatcatgatctcatctctcataggaagggttgcgtattgacatccaaacgagcacaacatatatagacaggactatttgccagccaccttgttgcgatttctagtgacgcttgtaggcacgaacttcagagcagacatagacttttccaggtcatcaatgtccatatccatgtcatttggtggtttattttcagggatagctgctgccggtgggttcgattgagacgccgagcttcggcgccgcaacctgccctccagagccgacgacgttgagagacgtcgtctgtggctgttcatgggccgcagcatagatgtttgcttatcgatgccgtcattgacaatgtagaagttgtaactctgtataatgtgtcagtgacgtaggggcgctattttgatctgaaactcacccggggaaacatgtgtttgtcgataagatgtagccgtcgtttctgcggggttgagcatttccgctcgcagtcttcgatgaagcacccatactttggtttgatttagtaacgtgggggtatagttaaggaggtaggctagggcttacggtcttgtctccacgggcccgccgcgcagcagccagcgggtcatggttctcctcgatgtgtatgttgagcaaatggccagtagggaagttcttgctgcacttggaacagcggttgacatgggattgaagataatggacctcgtagtcgtcgtaggaggtgaacgagagcgtctcgcggtgaggcggtaaggagcaatgcatcacctcagggagaaggaggttggtatcactgtcgatgagcttgttgcgctcagatggaggagtcgtagtattcactgcgattgaggatactgatattgagtcttgatcgagagatggagatctcgagcggcttcggggtcgtttcgacatggtctaattcgccttgcatattattgataggtcaacttggcgagcgtacggaggagtacagcgaccatgcaagacttaatttattcactctccgccttgtaatctttttagaagtctttttatatgcttttcttctgaagatgtcttcttcctcttcttaagctttctggatagatggcagaaaaaggcgggaagggcttatataaattttgatgagcggcgccggcgggttcatatagcgatttgatatcttattgactctacaacatagcaagctacttataggctacgcctctaggatttaagccaagtgtttatgtgtagtattccttaacaatgtgtgttttactttccatcatgttctcctctttttctttagatgtctcttgcctaagggttcgggcaaatgttatagaaagtacgtcaacagtatgatatcaacatctcgtaccaaaaagctcaatagaactagttaaaccagtttattctgaaaacatcggcggacggcaaaaatacctagttaggtcttttccatagatgctataaccctccgcgcgtagtggagcacagtgatctgttaaagacggtataaacctcttcgctagtatacattgagacaatcctcatcttcaccttcctttgacttgcacatgtcgctgtccttatgtcgctgtgcccatgagatgaaataaacccgtaatcagcatacgttacgcgatacctcccgccttggcaacaccaatcatcgcggatagtagaccgagatcgcatttatgcattttcatactcaactcgaatcacatcatccctgtgcgctttcatgtctttcacatactgatggctcctccgccgttcatattccaagccatagccatctgaccggcgaggttgacgctcgggatccccgggctaacttcctgatggcgccctcgttcacggatgcctggaagttagtgctttcccctctcgatttcggctggattgtgaacattgaccagtggtgtgatacaggactgcaatagaagccgagaaagagcttctgcaatgcttctcgcaagaacggcgcacattcgatgaattcgaacatttcctctccgagtcagtgacaagccccgcgcgcacgccaacgcatggctgacctctttcctatataggttccgaacctcttctcagaatgcaatcctcctcgatttcaatgcttcccgcgaggccgatgtggagactcgcctttgggatgcgcacttgaaagtgaacaatcggtttcgcaagcagttgattcgcgtgagtaccccacggaagcttttcgcaaagtatatattcgctgactgtggttgtctatcattagtttcgcgaagagcacggcaagaaaaaaccagtggagaggcggaaactcgaacgccattatctcgatttcattaagtcaagccagcggttttaccgaggatacatccagcacttgtcgtcgcgatttggggggattgttgagttggagagagtggcgcgcaagttcaattttgagagtaaggcagatacacaagctgcgcgccgggtctctaggcacgctgacccgcgtttgtttttagatctgtccggccaacctcctatcaagccctccaaagacctgcgtaggctgattctccagtcttgccacgcaactcttatccggctgggagacctttcccgctatcgtgaatcggaactcgtcagcaaagatcgcaactggggccctgccatcggttattatgatttggcgtcggtgatcaaccctgcttcgggtgcatctcagaaccaattggcaattatcgctctcgcggatggaaatcatcttcgtgctacctaccatctctacagagccctgtcagcccaagaaccccatcctactgcgaagggcaatctggagattgaactccgaaaaatcatgagtgcttgggctaagaaagagctgatccgccccgaagatgccggtatccctggaagggccttgacctcgtggtttctttatctccatgccaaatgttacaagggcaccgacttccccgagcacgatgagttggagagtgaagttctcagtcaactagcagtagagattagagaacgatcactagaggggacacttcaaaagttctgtctcattaatattgcggccgaggattttgctaaggtccggtctattggtaagagctcgaaacattatcattgctcatacatctgcttacttatcttagaagagtctgtcttagaagcacgcgtctttttccaacgcatcaacgtgaagacatttttcaccttactgcaaatacttttggtcgaactcgaacgaactgcttcttttgaagatccgaacagcaaagatgaaatgcctatcccagacaaggtgtccgtggttgctcgtcggatcctgcccgcgcttcgccattacagctcctggctgcttacaaatagcaagtctctggttgagcagaaggaggaaaaagattcggcgctctcgattcaaatcaaagagttctggaaaatctatgccggtacgctgagcctgctcgcatcctcgtttgatgtggtcagccttcccgaggtcgattatctattggaagaagacgaagaaagtcttggttttgcacctctagatcaggatgccacttctcgccgatacgttggaagtcgtgatcagccaaagcccaggatgcacgatcttgggattgaaagaagtcaccccaacatggaaatgctctatcgaattcgtgaattcgtgattgatggactcgacttggttgttaacggagtatgtggaaagctctgaagatattataaacaaacaagcagattgctaacctcgtttagaaaatacccgtggctcttgtggacagtgaagacaagaagacatttatctatcaagaagaggatctgccttcgcaattctattccagccctcatggccgccagaatgcacttccggttgcgagcatcgagcgtgaggatatcccacaggccggtcaaaatgcatactctgccgcagaagcccaaagtctgttcggcggttcccagtctgcatcggcatctatgtccgccaacatgcatcagatcgttgagggcgttgaacgacttgttgactcggacacgtatgaaaccccatccaatggccaatttgctttcatgagttcgggggagatatcgacacctacgcatgtctcacccaatgtcaatgcttacccgttccggaacgaaaactctccaccactcaccactcccatggctcctccacctgggcttggtccaccagtcataaatacagctgagcctacatcggcgcaatcatataccccacggcctgccattcccagcatccctagcatttggacaccactgagagacaccgcccctccacgaacgccccctggccttggtccacaacatggccagcgagctccactgcaccccatggcttctggaaatgccatgccttctgagcgctcgccgtcgcaagatcagttagcaaatgagctcatgctccgacagcacttgatggcccagacccagttttcaagctcactggacgtaggatcaatgcccacaccgtgggcatcatccatctctcatgctcgtcccaccgccagcggttgggatcatggccgagcgaccttcggtgcattcgaactcccgagccagacgatgtccagcagcctgggacatcagtcatgggccaatgacgctttcatcgccagcagcctcgctggggcaactccctacagctccgggattggcgggcgcaagcctgcaacccagcttggagcagtcggtcaaaccccaccctgtggccaaggaggctgattcgaatattaaagctctcattttttagttcttctatgtgcatatgcatattacactaccagctgggcaagctgtcataattaacagtgctacccgacctccaaatatcctggcgtgtactgtgtttgtctgtggtcactgagtctacaagttcaggcctacactgacagtatgcacctttacaacgaccagacgagattgtattactgctagccagtttcacaaatggcagatcccgcactagtcctctggtggcgaggacgcttatggctttttttccacaattgcaggaacttcttcggtcctcgctctcctcgcaattttgtctggacggatacgtgcgttcaaccacaggacatgatcaatacgaggatatgaacatggacaatctgccattggagaagacatttgtttcgttctgttttctgccttttcttctttttcatgcaacatggccaggaaccgcgttatccccatcaaccttagcctcgtcttttctatcgttagaagaattctagggcgcggacatacggtgatctttgaaattagtatgggcctgcagattactcggggcctattaccctcttgacaccatcgtgtcggttaggcaattgaaattcaaatttgcattttacgtgcttcttgtagtatctacggtatgggctctttcttgcggataatagaagggtagatcgcctaaatactttcatttatcaggtggccgttacaaggacagccacaggtaattagacaagattctcaaaagtatgggttttgttcgctttttcagacagtacgttgaagtcatgaaattttaagaaagggaaaaaattgggtatagagggttgaatcatccaaagtcaagtggtgctcatccagttgttgaactggatcgcacaaaaccttccaattaggttggtagatatgttgaaggtgttggtagtctatgctttttttcgtagcctacattatgaacgcttaggagcgggagtaggtctgcttgggggaggggaagctgcgagttaagagttgttagctagtgttcttgcaatgtattactttgggaaaactcacgaaggtccaagctcctggatgctcttgctggcgagccactggcccatgtcgatgctgtcatcgagggacttgcccgcgacgataccagcgcagaaaccaccggcgaaggcatcactataaggaatagcaagtcagtatatatgagtggattgttcagatcaatatcactcacccagcaccgttggtgtcgttgatggcctccttggagatttcgcggaccttgaactccttcacctcgacgtcaccggtagcagagccgatggcgacaatggtggggagagtgccctgagtgacaatggcaacacggggacgttgggtgttcttcttggggagctgagcgagcttcttggcgatctcagtgatatcctcggtgccccactggtggccctcggagtaggcaatggcctcagtctcgttgcagaaggtgtagtcagtgtagggcaggacgctatccagctggtccttgaagaactgagcaatgaaaggggcagagagagacagcatgaaggtctgacgaaaataaatagattagaaaaaaggtccaatgcagcagaatgcaaacgacataccttgttcttagcggcagcctcctcaccaagggcaaggatggcgggaacacagacagtcaggtggtagccaccgacgtagtaatgctgggccttctcgaccagagaccaaacctcgggctgcttgaggtgctcaagcttgtactcgttggcagcagcgaggtgggtgcacatgctgcggtcgtggccagtgatgacaacaccacacttaccggtgggctgggtctcgtcgatacggtactcggtgtggacaccggcctcctcgcaagtcttcttgaggatctcaccgtacttgtccttaccgatacaaccgatgtagacaacggagttctcagggagcatgtactgagaaaattgtcaatatcaatcatggggatcacgagggtgttttaatccatacctgggcaccacgagcggtgttctgggcagcaccaccggggatcagcttggcatcgcgggcaagcaggtcctcgtagatacccatgtgcttctcctcggcgaggatagcatcattgggcttcagatcatacttctccaggagagcggcatcgctaagaaatatcagcatttagaacttagcaccattttacttcaggttcattcatacccacgagcctggatgtctgttgcaagcaagtcagcattttataaacatgtccagatgatccttcacataccgaggagagggttctccagacacagaagagggtaaccttgagcagcagccattgtgatataattaatgagagattaaagagaattgagaatggaatcgaagtaaaaaggtgggagaagggtgggaggatgtggaggatatggaggggctggcagaaaagagcggactgcgtatccgcggtcccaccggtaccagccgaacaaccttgggagctacttctattcaccccaggctgctcaccttcgtataaaaacccaccaaaatggccgaccatgctatggatatcccgcagattctccaatccgcgagcatcaatcgcaatccagacccatctcttgacatcaatccagccaccacagcttcggagaaacgacccgtcgcggtaggcccagactccgaaacaaacagcattgcctccgacgttgtccatccaagacaagtaattcggccggtccgccgccgacacactcttcctcctcttccggatctgcgctttgagcagagctatctagccagcattaaggatgctgacacctggggccgagtagcgtggattactactagggatcaggtatgcatcaaatgattcctttggggtgtcaaggataatctctttgataatgcctggctaacatgtcaatctttccattctaggtacttctccctctgatccaaggaaccgtttggacactcgcgctctccggctggcgtttctggaaccgcaatgcttcagtcagcggacacaccctcggcagtcgtgttcgcagatggtggtacgaagtgaacaactggcatctgccgcaattgggctcgaccagagatcataagcaaatgtcgcaggttgaaaatgtgagtacccacttcgccaaacataaatttctcatctgatctcgaccagaagtggagaggctgacgctcgaggagtttctgcagttttacacagcccagttctccgatgcaggctctaactgaggtcacttctgcgctggatgcgacctgtctagtgtacactgtattgcttgcatttttggcgtttgcgctgttgggggcgcctgcttttgttgattcccatttcttatatacctcgactctactatatagtagattaccttttttttgccatatctggcgtaccgggcaaacctcatgggctgccgcgtcagaacacaacatttgcgttgtcagttggcataaatctgtatacatagatctcgagtacgtgccattcgaatttagtgttgtctactgtgtagtgaacttattgattatgagcaagacaatattttgagcttcattccatcacttcgcgtgccgtttgtaccgatataatacacacagcctgatagaagtacaattgcaatccaaaaagatctatctagtgacatttcgtagaatatatattcctggcctctttctagtccgactaaagcgaaaacacctattctgaagtgaatccgaatttatagctagatggttcaaatttgatccacgccgtttgaagaaacggatggcgcagctaccgctgcagcagaatgagtcggtacttggggtatcgaagcaaaagggtgtgaagtggcaatcattgtcggggcttgctgcgcatccgagtttgattgatggagggtcttcggcggtgcttgggcggaggatgctgctgcggtttcttcggcaatttcgacttctttcgccggaggtgattttttgatctggacctctagattgctaggtgcatctcccttgccatatcgaagttgcacaacaaggctttctggctcctcattgccgcttgactcatctgcgcttgcttcgtcctcttcattatcgccttcgacatcgtgctccaaatcgtcttcaacgccttgccattcgttgccgctttcattcgcgcttgaaggaacttcagatgcatcctccaaatcatcggcgtcgtatccagagtatccgttggggtgggttgaagtgcgagccctttgcggtctgattacttcttcttcatcatcttcatcaaactcatcatcatcagctccgttgcgttgaccaatcaacagagcctcgccatagaggcccccggcgcgagatcgaatctgtctcccgcttgccgtgaaccgagggcgtctagactccgtggaagcttccgtaggagctgcatttctagtggagcggcgagcggaaggctcatcatcatcagaaaagatgtcatcgtcgtccgagtatgtgtatttcagtttcttgccgcgtgtacgaccttcatacatggagaacccaggatccggacgaacgaacgcagctttccgagcgagacggtattcgcggcgtctccgtttctaataatttattagcaaaatccaatgtactctctaggtagaaaatcacctcttctgatgcctcaaatcgagggattgaagcgcgaattctctcgctaagcttcttggagtttgtgcctttttcgccctcgagtttctccacgacagcctccagctcaggaatactccccgcgatgctccaccaagtgttgtttttgagggccgggttactttcgcggtaaaggcggaaatttgtatcatcatgcccttcgataagccaataacggcgtttcaggctatctctgccccagggttggacagacaatggttgattgagatcatcatcgtggcgcgcctgcttgtaggattctttaatcttcgcctgaaccgcttcggacgacgaaagtgaccacagtatcaaggttcgcaataaacgcagctaagagaagacatgtcagaatcgccaatcgggtgtcgtggctattaaaaaacatacacgttccacgggtgacatggtcgcaaagctgccacccccatgaagagggtttttgccctcccattcttttggccactgcgcctgatgtgtatggattgcttcttcgaggggacgcgtgaagtgatttcgtctgtatattcaaatattagataagcacttgacttggcttgacaaccgatagcgtgcgcgtcttcaagcactccgcacggtatcgggcgacaggtggcgaacatactcaacttctttcttgcggttcagaacaagcccaagcaatgcgcatagaagtctttcgatgtattctccggggggcgactcctcaatgcccttctcaatatcctgtgggccgtagtgtggcacacctttggggaacacttcatggaaacgcgcgcggaacgcgacgatgaactaaagattgcgataacttagcaagcgtgttctattgttggccaaacgcgtcatttgtccgtagaccaagcaatgcgcaaatcttcctgccaaatagactcactgcaatatcggggttgtcggccacgacgtattcatgcggaggtgacggttcccgcttcggtggcggcgtctcagactccttcttgaagtactttgctataccagtcgggtggtcaatcgccatagtagcttcgtcatccgttggaggtgccgatgataatgatgaaagttctgaatctgaaggcatggtggaagtgatggggtaggtggaaggaagaagtaagttgcgcgcaatcgagccgtcacgtctgcacgtacggcaggtttttgggtccatcgcgccaacctatgtgcaagcctttataagcaggagattatttctctattttagagcacatttgtgcaaactcgatacatgccctactctaaaatacctataatatctaactatatcccgtagagaaagtctagcgctataaaaaccactttgttatcatctttctatcgctattctagggctttttagaatatagccactgactatccccgaatattgttagtaggagacatttgatacgaactatttctagacttttaagagaatacacttatgtatcaatgttgattcatggcagccggttaaccttcctagcgcgatggacacaaaaacctgccgtatgcactgggcttgcgcccgaggctattatctcaaggattccggagacaactgctccatttgtttgtaacatattttaccgaggctccttattgtcttctgtaagagaatgaatcaaataaatgagatattggcataaaagcagcttgaatttgcaaattactgtatagaagtagagctgagctgagagactggtgaagctctatttggtattttcaaaaccccaatcaagtcaaagagatgtaatagcgcagggagaaatgaatgtgactagctgggacgaattcacatatctgttgctttcatactagacctcgagaagtacgcgacgagctttgtgaaccattggatattgacatctgtaatgtttgagaggcaagtatggcccaaggctgtttaggcctcatttaattaataggtccacacaccaaaaccatagacagaagcatagaatatacagacacaggtgtttcgaggtccaaggaagagagcaacactccaaaatgaaaagtcttggcgatatctagtcttggcaatcacgtgtgtgctgatgacataacctgccctctcaaaatctacagggcttgcactgaaagagtctcttcaggcgtcaaatggagattatacagagatatttcagtcgaaagcctttcaaaatactctttttaatttagtaatgcaattattatctataatcaccatataaacctagcggttaaaggcctatttcagaaatgctgtagttcaagccaattcaagtaagcgaccatgcgctatacccgattgggttagattagcgaccgcaccctaaagcccacacaagtccccgtgtccgatgatttctcaactcgtcaacgacaagcctatttcacttcgaggtacgcttaccacttttccacgacacttctgtccggcttccatactaacataggatcctcgtctagacagtcgccatgggtcgtgtcatccgcaaccagaggaagggccgtggctccattttcagtgagtgcgaccgcaaaccattcccgcacgaaattttgaggctgcgcatcccgagcagcgaggaggaaatgaagaataccattggaagaccacacagattcgcaaggagattggagtgctgattacgaatttttctctactttacagcggccaacacccgcctgaacaaggcccctgcccaattccggaccctcgacttcgctgaggctcacggttacacccgtggtgtcgtcaaggagatcatccacgatgccggtcgtggtgctcccctcgccaaggtccagttccgccacccctacaagttcaagatggtcaccgagactttcatcgccaacgagggcatgtacaccggccagttcatctacgccggtaagaacgctgccctgaccgtcggcaacgtcctccctctcggctccatgcccgagggtaccgtcgtctccaacgtcgaggagaaggctggtgaccgtggtgcgcttggccgtacctccggtaactacgttaccattattggccacaaccccgaggatggcaagacccgtgtcaagctcccctccggtgccaagaaggtcatcaagaacaccgcccgcggtatggttggtatcgttgccggtggtggccgtaccgacaagcctttgctcaaggccggtcgtgccaagcacaagttcgccgtcaagcgcaactcttggcccaagactcgtggtgttgccatgaaccccgtcgatcacgtaagtttccgtctatacacagatccgataacatccaggaccgcaatctctaacatctctctctacagccccacggtggtggtaaccaccagcacatcggtaaggcctcgaccatctcccgctacgctacccagggtcaaaaggctggtctcattgccgcccgcagaactggtctgctccgcggtacccagaagaccaaggattaagggtgctttttcttggagttattcttgtgacgggttgaaaatggaattctgctatgagacaaatgtacttaggcgcctgcggatgagcgtctcatgcgcccttagcgaattaagcttgtggtcaccatcctttttcttgtcgaacaaatcaaagggtgatgggaaggggtccggggttggcctctacagggcagaaacgaaatcaaaaagtcctccgggctgtggaatgatacacctttaaatttttactcgttcctatccatcaccttagtagatattacagtctagtaattcatcggcatatacatttcgatgcatgatcgttgtcactattgccagtgccatacagtggtgaaacctagcgttccacagaaaggtttgcatcacttgttgtgttatggtcctatggatgtatatatttagctctcaacgttgaccatgtatatatatgaacctagcacatatctcagcaatgtagtctaaccagaaatacaaggcatcatgaggttgggcccataattaccagcccaaacgaggttagaagcattatatatagtccgttatgctcgttgatatgtatctcgtgattctacacaacagatgtgcaatcggaagcccagatccctgtattatatgcctttgtttcttgcaaactgcctactataataaaaaaaggcatagctctggtgtaatcgatttgggaagtcaactgtgtctgtcgtaggttgacgacgtacacgcagatcaatgtgtactacgccaatctatccaattctgcccccctttcttcctctcccccaaaccccactcaattctataacagtaatttacttccatgaattggaagataaatcacagcattctcaccatgtcatccccacttgatgaaaatgccatgaaccagctacagtctgaacagtcagaactgctggacaagattgacgagctgcgcgccatcggagttggaggccttgtggagctgcctcaaatcatcgtctgcggcaatcagtccagtggaaaaagctctgtattggaggccatctccagagtgcgctttccatccaagagcaatatctgcacgcggttcgcgaccgaaattgttcttcgccgaagccctcacgacaggattaaagtatccatcgagcctggggattctagggagaatgagcaggaacgacagaagcttcgagccttcacctccgaggccttttcctctagtggggacctccccacactgatcgaaaaagcgaaggaatgcatgggcctttccagcgccgatccttcgagcgttggatttagcgacgatgtcctcaaagtcgagatctcgggccctgaaaagccagagttaactctagtggatctcccggggctctactactccagcagcagcgaacaaaccgagcaaggaatggtgatagtccagaaactgacggaaaagtacatgaaaagctcccggagcatcatcctggctgtcatcagtgcaagggccgattatcatatccaaaaggtcttgaacatcgcacagacctttgaccccaaatatgagagggtcttgggcattgtgacgcagcccgatatccccgaagcgggctcggaggaacaagaaacttatatacagttcatcaaaaacgaaaaagtcaagctgcaacttggatggcatgtactgcgcaaccgctcgtttgaaacgtgcagcatttccgatgacgctcgagacgctcaagaaaaggatttctttgaaaagggacggtgggcttcccttcctcgagatcaagtcgggatcgaaagtctgaggcatcgcctcagcaagattctacttggtcatgtccgtcgcaatcttcctggtcttattgcggacatacaagagaggatttctcataacgagcagacactagcaaaaatgggcacgccgcgcactactcttcaggagcaacgccgtttccttgttgatatcagcagcaaattcgcgcgaattacagaccaggctttgaatggatcgtacgtcgatgagtttttcggtggattccaagatcatacggcgaccacaaaagagtctcctttccgccgactgcgggcagtaatccgtgagcttaacgagtgctttgctgaagcgatgagcattcgcgggaaccggcgaatcatccaattccctggacagtcaacacctgttgagaatgtcgagcaagagagatccaagccttatatgagtgattggacaccgcagtacatttcccaggagtctcttgtggatgagatcaaggaacaggcccgacagagtaggggaattgagctaccaggtagtgcgaaccagctacttgtggggagtttgttccgagaccaatgcgagccctgggaagcagttgctaaatctcatctgttgaatacctgggattcggtcgaatactttatccagttggtcctgaagaacctcatggacgatcagacccgcccgttgcttatgcgacacctcatcggaccggaaatggagaagatgaaggagtctttgttggaaaagctcagcgaattgacctcgtactataaaaggggccatccgttgcctgtagggacatcatttatctccaagatccaggagtccagaaagaaccgccagattgctgcgttgaaaaagaacctccagcggtctgaatttgccccgacgggagtggatactttcaatgtccgagatctagagcgagcgacatctcagctacagtcatccagcgatcagtttgcagcagcagagattattgaccaaatgcaggcctactacgaggtgagctagacgtcgaaatgagatatcgggtagttctaacaggccgtatttgcagactgcgatcgtgacattcgtcgacaatgttgccatcttggctatcgaaaattgccttctttgccctttggagcatatctttaccggcaagactgtacttgaaatgaatgatgagcagattcgacaaattgcaggagagccatcgaacatccagaaggatcgggaacgtctgaatgaagagctcgaaaagctccgaaagggaaggcagactctcaatgccttcgttatagcggactcttcgctgcgtgctcgtcctatcttgggtacttacattccatataccggtacatggaatcacaggctaaccgaaatatcatctcagcaggaccgccaaatccccgagctagaactccaagccgtgcaggcacggctccgatagctcaggtggcgcccaatactcgtctgttctcgcgagtttcacctgctgtcactggtaagtagctcttcaaataccacgtcgatatgtaaaagctaattttcaagcagtccctgctgtgtcttctcttcctgtcgtgtctcttcctgtcgcgtctcctctccccatccttccttcaagtcaaggaatctctgatacagctcagggttctttattccgaaatccagggaatggcggatctttattccgagacccagggaatggcgagtctttattcacaggctcattgaatagcggatctttattcacaggctcattgaatggcggatctagacctaacaatggagccaccaccacgctgggttcattcggtttgtcacccggtacaacatcggccaccgggaatgtgtctagcccaacggtcaatgggacgtttggttcgaataaccaaggctctaattctggctcgtcgtccgctcctttcggaagttcgaccagcccaactcccttgtggaaacctctctttaacgcgacgacagctccaagcaccttgggatacaaaccagcgtaagttataggatgcgcgggacgggtccattctaattattggtcaccttgtataggtatcaggagagagagcgcgactcaaatacaatgaactattaccaaacccttggcgttatgcttccattttctagctactcctttgaggtgtgtagatcctttgagtcccttgagatatagtcaacacttagtactatatgtgaagaaggaaagatattgacatgaacttggttaggagcttcgactcggagactacgcgcgaatggacaaatatctctcgactttgccattggctcgttgagacagaatctatggtaccttcaattgttgttggagtggtgtgtatagtcatggcaaagttgcacaggaaccgaagattattcggaaccaggaaggcaaaatacaacatttagcataccaagtaaattattcaatcctacatgtacatgctatatattgtaggtagccctggtgtactaagtacaccgttgtacattgaggcattgggtagtctggacgctgattggtcactttggggtcaaaccatcgcctaggcagatttcccgaagttccctctacctggagtaatttgatgccacaatgaatacaatatacaatatctcgaagatatctatagtatgaatacccggaaaatgacagacccatccaagccccagcagatcccccgactcaacccgaatcccctcaccaacccggaacggtggcaagccatcgcaacccgcgacataaccgccaacagcttcgtctacggcgtcctgacgacaaaaatctactgtcgtccctcctgcccagcacgactagcccgccgcgccaacgtccagttctatgacaccgccccgcaagcagagaatgccggcttccgaccctgcaagcgctgccggccgcattcgggccagacggcggctcaaagcaaccctcaaaccgccaaaattgacacagcctgcgagtcaatccggagcatcctgacagcaggactgaaaccgaaattaagagatctggcggccgaggctggcttgacgcctagtcatttccaccgtgtgtttaagaagcacgtgggcgttacgcccggtcaatatgtagagagtcttgggcaaagccacctgcactcaccggaatcatcgccatcctgtgcttttcctgaaggtggaacgccgcgctcggcgttgggggataggggtggtgaggtgttggatctagattggaatactagtgagaagggggctggtctgtcggttgctaggggcaattttccatttcccagtggctggaatgaattcgatgctctgctggcatctgaatcggaacagacgtggatacctggcttatctattgaccctcgaatgaccttggcggatgtttctgatcggaccatatgattacgatatggatacttgcactggagacgagtatatatattcctaccaataataacggaccgaatggtggatgggaattttcgccattttactccgtcggatttgacatgcaacttgttgtattgtggcgatgcaacccactgatagtcgttggatcttgattcactgttcaccgtaactcgcaaatcacattggaccggtccagagccagggaccaactgaaacagttttgaaacctttttttaaagccaacgcatgcaccgtgcgagtattatacgagtaatacggagtatgtatatggagtgcatagtttagtacggagtctatccaaggttattgtatactattgggctccatataataaggataataaactagtagttcactaatgccactactttataagtcacattctaatattccctggtggcaagggataattatagtaattcaacgcctccaatgggatttagtggctctccaccagttggtccactaacgcgtgtcacagcgtttactgggggtggttctccccttggtggcaggctattttagggctttgtatggggatacgccggtacagagcacggagtactacggagtaccttcggacgcaatatgactgtcgcattagggacttggtagttatggacatttcgttatttcgttatttattcttcttcttattcgtttcttgcttcaatggcaataataagagagtacaggcttccccactgattgacaagatcggcgttactgcatgcataaaaagcattgtattttgttgtaacttgtatgcgaatattcgattttatcataattgcgtgcccccccggcatttaatctaattcccaacctcctttcccctccccctcccccgtcttttctcctgatcctagagcattctagacattcccttaccactcccttaccattcccttccaaggttgaccttttattctacacaatcgctggtttcgattattcttccgcataccattatctctcgccaacatgcacgtcaacaagagaatcggcagattcaaacaatgggctggagaacgcatgggcggggaggccaagacctgcctgtctgatgatttcaaggcaatggagacggagatgggcgtgcgacaggaaggtaagaagtggccacactccgtgcctgcagtgtatccatactgacaaccgctctctatctctaggcgttgagcgcattcataaatccatgacctcctatgtcaaggctatctccaagcgcaatgagggtgacgacaaagaaaagaccctcccgattgcccacctgggaagcagcatggtggcccacggcgaagatttcgatgggaactcggaatacggacagtgtctgatcagtaagttctgaagacgacctggggaatgcggcgaaaaaaatcgaatccctaacaattcgatcagtgtttggacgcaccgaggagcgtattgcgcgcatccaagagaattacattgcacaggcgacttcaagctggcttgagtccttggaaagatccctgactcagatgaaagacctgcaggtatgtttttggaccgaaggttaaagttgaaagtcaatattaacctgctcatagcatgctcgcaagaagctcgacagccgccgactggcatacgatacttctctttctaagatggagaaggcgaagaaggaggacttccgcgtggaggaagaactacgctcccaaaaagtgaagtacgaggaagctagcgacgatgtgctgcgtcgcatgcaggacatcaaagaagccgaagtggacaatgttatggacatgggggtgttcttggacgcccagcttgactaccatgaacgatcccgcgaagcccttttgcagctcaagaatgaatggattgggtaagcattgatctagcctttgcatcctcgtgtgcggtactaatactgaaacagggacagccaattacagccccctccccgtcggccaacccgtcctcgtgccaacactgcccactcgttccaggaacggtatgagccgctgcaggaggagtcgattaatgagactcgtgctcctattagaccagccagatctattacaccatactctgactcgcccccgcgagatgcctatgggaatgccagtgtctcgcgtcccgttctcaaccgaattcctacatttgaaggcccgtctcaactgcgacaagaacaagcgccagttgcatcacagtggctccagcagcgaaccaccagcgagaatctgggcgggtttggacgtcgaagcagcacccaagttgggaacggtcgagtctctgctgatccttacgccgactccgaagaggtcagctcatatggccgttctagccccgagcggatatttagcgggggcaggtccatatccccagcaacatctcacggcagtacgccatcccggagacctagcgcaaccaacttgaacactctcggatcgaagaaggctcctccgccccctccaccatctcgtgcgaagaagccccctccccctccacccaccaagcggacccttcttgcggcaccaaatgcgtaagaacgctctgaactttgaagtgcatctcacgtctgttcttgatcttgagcatggggttttggagtttgggagctataggttgtggcggtatctattcttatcattccgtcacggatgccttgagtgttacaggattgttctgtcctttccttgattgttctttctagtttgcttttcccatgattcccatggaggtctggaggattccccggctgctattagtctcaacgcagagttagtaggttgatgataaaagtggatacctgcgtcttctaagaataggtagcgaataggcaaatccattcaagtctttgttcatttataatgatgatcttcgatcgtgtcgatacccgttgacagccagggtggacccggtatgtctggctttacaatgtattgtcatttttattggtcattgaaatgaagacaattcaaccgattcaccctcattccatacacccaatgtccgatcataaaaccaatcctcttcttttataaccacctcccatagtagccctgatatcccaaaccggcacggtaccagagctgcgctgccccaagccacaattcagcacggggtcacgtgcctgctgactaacgtccgttgaaaaaactccttgccaggctgttgtcagtcctttgctctgagcacccagatttccccgagcctgtcgcgcaactccgttccctccccatctccattttcatccatccactttttgaacgcgccatcccaacgcgccttcaacttttgagcttcccttccaccttgccttaccctgggaatccgcctctttactcgctttctttgactcccttgtccctgaagtacccgacccccccccatcgcatcggaagctccgaccacggccccaaacatcacgtctgccatcgccaagcatcgcatacagtcgctcactgatcgcattcacccataattaggcctcccccacactgtcgccgcctctttatttcgaccacgatcgccacttctctcttgcccgcgcgatttggtaattgggaccaggtggagactgtgacttgccacaactccgcatcgactttgatattgctcaccctagatcacgtcgcttgctgatgaattaaaaaaatacacgcgttacgatggcttccttacacccagcgccaaacatggcgcctggcaacgtgagcttgccgtctaacctcacgcagcaaaatgtccaggagatactccaggtaagtttgtcgcattacaactacacaactcgttatatatcaattcgttattccctcgacgcgccttcctattacatgccgtctctaacgttatcgcagaaatacaagcaaatgcaagaacagggtgttcgccctgatgacccggaattcctcaaggctcacaacctacttgctgctattcaacggcaacaggctttccagaaacaacagcgcatggctcagcagcagcgccaacagcagcagatgaatggcgctactcctgaagctgccaatggctctcatggtaagttttgtcttcacctccaaatccaaggtcttctacagggttgacacatattcttacaggtcgcacgccctcgacttcctcgattgccgcacctaatgccccgaatgcctcggcggttgcccagaataagaatgcgacggttggcagcggtagcttttcaccagagcaactgtctactcttagaaaccaaatcttggctttcaagatgctgtctaagaacctcgccattcccccgcgtgttcaagaacagcttttccaaaaccagaagaagtcccaaccgcctactcctacagaaaatgttgctacagccgaaaaggtcattgaagctgccaatgacggcgctggtagccagcctgcagatagctcagatgccgaagtcctgactagggagtggtatgatgacttccagtctccatatgactcgctctccaagactattagctatactgaccacgccaaccgcgcaaaccgtgtacgcattcccgctcttttgccacctggcatcgacttggaacagatgcgcgaggatcgtgaggtcatactgtataataaaatcaccgcccgcaaagcagagcttgcccaacttcccgccaacctcggtgtatgggataccagcaaaagtgacgcaccaacatacgatgactccctcaagctgaaggccctgattgaatacaaatcacttaatcttctacccaagcagcgactgtaccggaagcagctccagagcgagatgttccactacagtaacctcggaatgacagccaatcgctcaagtcaccgccggatgaagaagcagtccctgcgtgaggcccgtatcactgagaagcttgagaagcaacaacgtgatgctcgcgaatctcgagagaagaagaagcaatacgatcagctgcaagccattctcaaccacagcgctgatcttgccaatgcttctctccagcaacgtacgcgctcgcagaagctgggtcgtatgatgatctcgcaccaccagcacatggaacgtgaagagcagaggcgcgtggagcgaaccgctaagcagcgtctgcaggctttgaaggccaacgatgaggagacatacttgaagcttttaggacaggctaaggattcacgtatctctcatcttctcaagcagaccgataatttcctcaagcagcttgctgcatccgtcaaggaacaacagcgcaatctggcaaatcgttatggcgaagcgcatgattacgatgacgagtctgatcaagagatcgcggatagcgaaaacgaggatgacaatcacaccgccactggaaagaagaaggtcgactactacgctgttgctcaccgcatcaatgaagaagttacttcgcagcctgacatgctcgtgggaggtactcttaaggagtatcagattaagggcctgcaatggatgatttcactgtacaacaataacctgaacggtattttggctgacgagatgggtcttggaaagacgatccagacgatcagtttgattacccacatcattgaaaagaagaagaacaatggacctttcctggtcattgttccactgtccacgctcactaattggaacaacgagttcgataagtgggcgcccagtgtgagcaaggttgtctacaagggcccgcctaatgcgagaaagcagcaacagcaacagattcgctggggtaacttccaggttcttctcaccacctatgagtacatcatcaaggatcgtccggttctcagcaagatcaagtggacacacatgattgtcgatgaaggtcaccgcatgaagaacacacagtccaagctcagcagcactctctcaacctactacaccagtcgataccgtatcattctgactggtactcccctgcaaaacaacttgcccgaactatgggctcttctcaacttcgtccttcccaacattttcaagtctgtcaagtcgtttgacgaatggttcaacacacctttcgcaaatactggtggccaggaccgtatggatctgagcgaagaagaacaacttctcgttattcgtcgtcttcacaaggttcttcggccattccttctcagacgtttgaagaaggatgtcgagaaagatttgcctgacaagcaggagcgcgtcatcaaatgccgattctccgccttgcaggccaagttgtacaagcaacttgttacgcacaacaagatggctgtcactgatggcaagggcggaaagactggaatgcgtggtctcagcaacatgcttatgcagttgcgaaagctctgcaaccatcctttcgtctttgagcctgttgaggaccaaatgaaccccactcgcatgtccaatgaccttctttggcgtacagcaggaaagtttgagctgctcgatcgtgttctgcccaagttccgtgcgactggccacagagtcttgatgttcttccagatgactcagatcatgaacatcatggaggatttcctccgccttcgtgggatgaaatatctccgtctggatggatccaccaagtctgacgatcgatcggacctcctgaagcagttcaacgctcctggatctgaatatttctgcttcttgctttctacccgtgcaggtggtcttggtctcaacctgcagactgcagacaccgttattatctacgattcggattggaatcctcaccaggatttgcaagcccaggatcgtgcccatcgtattggtcagaagaacgaggtccgcattttgcgacttatcagttctaactcggtcgaagaaaagattctcgagcgtgcccagttcaagctggacatggatggcaaggttattcaggccggaaagttcgataataagtccactaatgaagagcgagatgcacttcttcgaactctcctggacacggcagaagctgcggaacagatcggtgatcacgacgaaatggatgatgacgaactgaatgaaattatggcacgatcggaagaagaaattcccatcttccaggagatggacaggcagcgaatcgccaacgatcaatatggtcctggccaccgctaccctcgactgatgtccgaacaagaattgcccgaaatttacatgcaggaggataaccctgtcactgaagaagtcgaggttgaggtcactggccgtggtgctcgtgagcgtaaggtgaccaagtatgacgacggtctcaccgaagagcagtggttgatggcagtggacgccgatgatgatactattgaagaagcgatcgcacggaaggaagctcgtgttgagcgtcgcaggtctaacaagactggacgtgatggagatgactcttcacctgagccatcgattattgatgatgacgagacccctcaaaagcagaagcgccgtcgtggtcctcctcccaagcgcaaggccgaggaagttgtggaagaaacgccacaacctaagcgcaagagaggccgccagcctaaggttccggatactctcaaccccaccgaccgtgccaacttgactcgcattcttgacaccgtgatccagtcgttgatggacatggaggctgaggtgccaccagagggttctgatagtgaagagggtcccatggtccggtcaatcattgatccattcatgaagcccccgccgcgttcttattatcccgactactacatgatcattcaaaatcccattgccgtggatacgattcagaagaaggtcaagcgggccgattatcagagcttgagggaattccgcaacgacatccatttgctttgccagaatgctcgcacttacaacgaggatggcagtgtgctattccaggatgctaatgatattgaggtaagtttgattcttgtcgattatcaattattatactaatgatacaacagactaagtgcttggtggaattgcgacgactgacggaagaccaccctgagctcgccaactttgaagatcagtacaacggtgaagggttctcgggcgccgacactccgcttaatgctggcactcccggccagccgaagctgaagctcacctttaacaatcccaaccgggatagcccaggcactttacacggcaatgaatacggccttggcgagtgattgttcaacactgggctgataacctaatgcagccatcccacgcttcatatagcgcctgcgactcttcaagttgctcgtgcttcttcttgtcatgtgtaatccgaaaatacttttttctcccccacttctgtgccatctaggaaaggcgttttttctcgtgagtttttgttttcgacattggggatggacttccggaggatggcgctgtattgttccaagcgattgatttccctgggtgtgttgtcttgactgcatgacaaagatccgttttgtgcaagaccaccccttgtatttgatgagtatgtacctgcaagttaggaacaattcgaattgatttgaaccatgtacgttgtaatattatctattgcgagacttttacaattgaagacatacgtcatttgttttccaaattctgtccttacgcgggggcgcccaagatgctgcagatgctcaccgatctttcagatcacataaaggtaaggtatcgccagcagcactcccttctaatacagacacactcttccatttagtcctcacctcgcaactatgtccacgaacaaagacctagccggcaaagtcgcaataagtaaggtctacaaccaccccaagagccagtagactaacagcgaaacagtcacaggctccagccgcggcatcggcgccgccatagccctaaaactcgcccaacgcggagcagacatagccgtaaactacgtctccaatgccacggccgctgagtccgtcgtcgagcagatccgcgctcttgacgtgcgcgccatcgccttcaaagccgacgtctccaaggaagaagaggtgaaggccatgttcgagagtctgcaccgtgaattcggccgtctggacatcgcagtcagtaactcgggcatcgagcatttcgggagtctgtctgaggtcaaaggcagcgatatcgacgctgtctttgcggttaatgtcaagggacagtatttcgttgcgcagcaggcttatcgcttcatgggagattacgggcgggttattttgacttcgtctatttctgccgttaaggtgagggctagagttgtagttttggtggtttgttaggttggagacggagctgacttctggtctgatttagggtgtccctcgtcatgctgtctacgctgcttctaaagccgctgtgcagggtatgaccaagtgtctggcgatggactttggtccgcgaaacatcacggttaactgcattgcggctggcggcgtcaagactgatatgtatgctgagatgtcggctaagtatatccccggcggcgacaagatgagtccgcagcagattgatgatgtcttgagcaagtggtctccgatgaatcggcctggggaggttgaggatgttgctggggttgtgtctttgattgctagccctgagtcgcagtggttgactgggcagacttggcaggtttctggtggtgcttatatggtgtagttagatggtgtaaatggttggaatgggactaatccaatctgatataaccagggatatcacatgatcatcctaagctttgttcttgatctctcgatagtcacgaatgcggatgctagtgtctacctggggatcctaaatatcaacatggcactacacacaatccgaccccttttcaaaagaacctctagctcattatagatcctatctgacctacatttggagatcaatcaacaatattcctttgaagtccccgtttgctccaaatacctcatcctagcaggcgacatcggccgtctggaagactacaacagctagcgtgccttcctacaaacctaaacatccaaattcgagatcgtattcttagcccttggaaaccacgaattctacgaaacaaccttcaacacaggcctcgaaaaagcaaaacagctcgaaaacgaaccctgcatgaatggccgccttgtactactccaccaacgtcgctacacatccgggactccgacgtgacaatcctaggctcacactctggtcccacatctcgcaggaatcaaacgaattagtcaattacaggatttccgatttccaaaagatcaaatattggtccgtcaagcaacacaacgaagctcactactccgacttgtcctggttaaggggtgagatcagagctcttcgggagagtacacaagaaaagcggtctgttctggtggccacgcatcatgcaccatccctgcagcgcacttcgagtccgcagcacgctgaaattcgtggaattgtgcttttggaacggatttgctggagttgccttgggatggagttaaggtttgggtgtttgggtataccaattatacgactcagtttagggagagggggattagggttgtgagtaaccagcggggttatgtgcttccttggaaaagtgaagaggggaagtttgatgttaggaggatggtatgggtacgattgaccgatagctacagaagcaagaagcacgagacttggacgaagatgaggcttaatggaacatggctcccgatatcaagccggacagacaaggcaaaaaactacaggtataacgtcacactgattctaccttagaatatcggatgcacctggcacagtattcagctgtccaaaaggagaattgaaagaaggcactactgttgcaagtctcatcgtctcactattgacggtagctacgctgaatacacccggcccaaccgcagatgctaaaggcatccggggattatataccacggcgtgggtctgtttcattcagaatatggggatatcagctattccgtggcttctcgtctgcggtagtaatactgcttcttaacgaactgttacagcttcgaaattggcttctatgctttgcgcaaccctaacccaaaccgcgctaggcctaacacggatagtatcgatacagggactgttacgtcgaaattacgtagtactatagtttcaaaactactttgtactcgtaagaaacaatggattgtcaaatgcagggttactagggagaatcgcagtgaattgtagacaaaatcagacaatgaaatacaatatagtgagaggaacccaattcgagaaaagcagaggaaggataaacggttcatgccttcatagcaagatgcgcagtttcccatcccagcagcgtattgtcatggaatatagtataaggatgagatgggcctaaaactcgttgttccttgagcacgcaggttcgaagcaaatcaattgctttagtatgctggcctgtagaattccacgtgaaggctaggttagccatgcccatcaacgtgttgggatggtccgcgccgagtttcgtcttgcgagtctccataacctgcagctggagctgctccgccttcttccatcggccctggctccataatgtcgacgctaggttggccatactcagtagcgtatcaggatggtccataccgagttttatcttgctcgtctccataacctgtagctggagctgctctgcctcctcccatcggccctgattccataatgtcgacgctaggttggccatacttagtagcgtatcgggatggtccgcgccgagttttatcttgcgagtctccataacctgtagctggagctgctctgcctcctcccatcggccctggttcctatatattgacgccaggttagccatgcccgtcagcgtgttgggatggtccgcgccgagtttcgtcttgctcgtctccatgacctgcagctggagctgctccgcttcctcccatcggccttggttctgtaatgtagacgccaggttattcatactcgccagcgtattgggatggtctgcgccgagtttcgtcttgcttatctccgtaacctgtagctggagctgctccgcttcctcccatcggccttggttctgtaatgtagacgccaggttattcatactcgccagcgtattgggatggtctgcgccgagtttcgtcttgcttatctccgtaacctgtagctggagctgctccgcttcctcccatcggccttggttctgtaatgtagacgccaggttattcatactcgccagcgtattgggatggtctatcgggatagtacgcgccgaatttcgtcttgctcgtctccatgacctgcagctggagctgctccgcctcttcccactgcccctctcgtccgtagactattcctaatatcgtagtgctcacaagggtgtctatatcttcggcgccgccaatcttcattctttgcttccttgacatagctgccatatcctctgcaaccgaaatactgccacattctatcgcataccacgcccctttatagagtagcgtagcccagttccggagtgagtcttgcgatttcggtcgatgtgccacagctgacctaacatgtggaaacagtggccggcatctctcccaattttcatattgaccgatcgggaattcaccacatagattcttgatgaaacgttccttccactcctcctcctgaccatagtttttcaaccatatgtgtactgctagctgcacaagccgatgcattgtgaacaccatgctatctttatctgaagtgataaaagaatagtctctgagaatcgcaatatcgctctcaaaatcggcatctacgtcgggttcagacgagtgatccgtatcctcatcacttgatctgttcctaacgtcttgcggagaacttaaaggttcatggtttttgtcttgcacccgcagaagaccctctgggattccctgtcggtcgaaaaagctcatcagagacagcaactcagcagcagactgcctgatccgtcgaatatggtcgaacgaaatttgccaagtcaataggatagagttttttgcctcccagtcttgatcgatgtgttttctctcgtgattaagaagttttgcggcttgccgatcaccccgacgaagcttttctaggtattgcaatgccgagcatcggggtgcacggtgggtgatgtagctagcggcttgcacaatcgcgagtggtatgaattcgagttccctgactagccgaaccatttcctcagtctctgcacaatcatctagcttcttccgcattagaaccagcgcctcggctgcattcataggttgtatatcgatcagatgtttctcatggccggcgagctctagagctacccctttattccggcttgtgactatgatggaaccattcgggcttgcgaaaaggtaccttagcggtgagtgcgttggggcatacctcgggggttctgcttgggcctctgtccgagtagtcaatggtttgcgaaggagctcatgatcatcgacattatccaggaccagaatccattttccgatcttgccatcttgcaaccagttcccgaagagttggaaaatattagagttgcgatcctgacgcccgggaatcttagcacggtcggcaaggttgcgcagactttcctcgcagcgcgcagcattactcgcgtgaacccagaaaacccaggtgtcaggcgattcctgtcggatttggtggcagtattcgatgacgagtcgagatttactgtcgcaaagttagacttgaacagaccgctcaggactatgttctcacccaacccctcctatgccaaagataactattctagatcccgggatcgaggatcttttgtggatttgagcgaggagttcattgcggctgacaaagtcgggatcatgctggaatggcaccgtccacagtggttccgggcgaggttctggttggtctaaggtttcgatggttaggtcaatttgctcttccaaaaaatgaaggtgattgattacctgggtgctggtggtagtgcgtcccaccatggtattcgctgttgttactattgtccacatatcctgcaaacacttttccaccggattctgcgttcacgccagaaatatgttgtgtaatggggactcttgacatggttgctctcgtcctgagcttcgtaccacgattgccaggcacagttaatccaaagaggctgatatgagcagatggtttttaagaaggaaaaagaatagagagatgaatttctagccaagtgtttgccaaagacttatataatcttatgccctctttgccgtggtctagccccggtaagcatttgatccgtttcgcgggggagaactgcattcttccctacttggctttctttcgagtcgatcaatttatacagaatcaaatttacttcaagccaataaaagtgtagcaccaaattattgtgatctaacttggttcctgtgatatggactatataaagttgatacgaaaccatcttgaccgaaaaccagcatgtccaggcaatgtatgccggttgtcctattattaggtcttctaccaatgatttgcagcgcatcccgcgctatacgaaaagctgcatctcgtatttcgttgtcacatcagctgcacttggctgaacgtgttgcattgcaattggtcgtcagtaatttgaaggctgatttcacccaggtgaagggggttggaatcaggtcgatcgtttgagcccattgtatgtatgttgcactcgtaaaaccattcgctgataggacaacgttcctaagatactagcagccataagccgcaatcaaatctagatcacttcagacgctcgtgccctacatccataataaattggcatattctcatgtcagaaacatctggcaggaaacaaattccctccatatataaaaaagcaaagcgcccaaatctcaagatctttttatactaaaacacctgcagccttacggtacttcacataccgtacaaatggcaacactcggtatagtcactggtggtatagggattgctagtgcgacaacacacagcatccacaaactgatccagactatcgatgctatcaaaagtgcaccaaccgagatagctaatctcaagaatgagctattggccacggagcaggttctgtcggggttggaagacgcaaaccagagctcccagcttgaactccttcctttcaattccagacagactttgcagagaaccaatatactctgcaaagatgcctgtgacaagtttaaggacaaattagagagctggaccaagcgttcggatgatggcgtcagtatgcgagatcgctttgggtttggcattctccgtcaaaaatctgtcaagagtttatgtgaacagcttgaacgctgcaagtcaaatgttaacatggcagttggcttcgcaacaatgtacgtgtttccacatgtatgaaaaccaccacaaagcttgataggctaacaactttgaaagtacaactttggccttgcgttctaccactaatgcaatgcaaaacgacttccaagccagagaaaatgaaatctcccaacaaatagtcgagattgagcagcaaaatgcggtagtacagatggatctagatgactccacagaggtatcgcttccaaacgatcaggagcatactctacttgtcgaccaactcaactatcaacgtgctactctggaggcctctcaggaattcatgaaagatctgcttacgcaggctagtcaggtccggagaggacaaaggataactgatgtcgaaatgagcggaaaaggaaaggccctcgttggaagagtaggcttcgagaatgacgagggcgatctttatcaggagattcacaacgtcaaagctacaactggtggcaagggaatagtaggggtggtcaaaggattggacatcaatgcgtttttcaaagactagatgaagtgcgtttaggcctcgaagcccatcctcgtctgagtattctttgaaagagagaagtgaaagttcactaaattgaaggaagaagctctataagtcgggggcttgtaacttcatttctgtcttctttttattgtgctttttataccttaatccacaagctatccacccgccgcctctgtgagatagtcttcgtagatagacgccatctcctgcggcagaagcatgactatctttagagcgcacgtgtgcacaacaagaaagacgctattcgaattcaagatagaaaattgtcaaggagaggttgggattgatataatcaattcaacaacaacacaaactaagtacaacgatttgaagcaaacatttaaagtcacaaacaaaaacagaacatgggaaagatttcatcgcatctatcggccgtcacatcaaggttccagcttgctatattgaccctgaatcaatgaaaggctgacatggactcgccgatgatacatcatcatgtctcatatctatcatgaaggttatctctatataccagcgtttgtatctgccagtgaagctctaatttcacatttgaagggctcacccttgaaagttcccagaagcgcgtgaaaaacgtgctcaattaccacagacttccgttcgcggcatagacatactcagccagcaacccacccgagatggcaacgccggtcatccagaagccctgcgagaaccacgaccagcagctcgcggggtccttgagatcaacgaagaagaccatcgcgcctacggacaggaagcagccacccacggtgacggaaaagaaggccatgctcatgttggagtagtacccgcaagcaaagagacacgcactcatgccgaggaacaagacgaccaggaacagacgcgcgtagctctgcaggagaaccgcggtgctcttcacgccgactctcaggtcgtcctccagatcctggtgggcgtagaccgtgtcaaagatgatcacccacaaggacgaggccacgaacagggacagggtagatttgtcggcccacggctcgggcacacccatggccgcgcttccaatcatgataccccacgtcagacagaatcccagcaccacctgcgggaaatgggtgtgtcttttggcgaaggggtagtaagtagtgccgaagatgttgggcacagcagccagggcgatgctgctgggaagaagtaggaggaaagaagcagcgatggcggcctggatgcaggtgaagatgaaagcggcggtgagcgagatggctccacgggggatgggccgtgtgcaagtgcgcgcgaccagcttgtcaacgggagcatcaatgaggtcgttccaggcgtggctggcattgttgcagaagaagcttccacccagcagaatgagggagacacgcaggacttcttcgacggaagacttctggacgctagcagcgtggatcacgccgaagaaatgagggaagaagatgatgaagaaggcggccggggggctcagacgacagagctggatgtacgggacgaaatatgaagggagatagtccacccatcctccggcatgaacgccaccgtattgctttgacaacgagtccttagacttgccattggctgtgccattgagctgctctgggactcccatggtgaaagatagcaccccggtgaaagagatgcaaagagaaagctctacaaactcgggggaagactattattgaactcttgagagcaggaggggcccgggggagataagacacggtatatctctcaagttctcgacggccagctcgcactttgcggcaaaccgtacccacatggttgtgcaaaagcaatctccgatagccttgctagtgtaagatctatccggatgaagctatatatgggtctctgttgggctgtgcacagtatctgacaaacgagtaggatcctcatctctgaacccccggggccatttactaaactggatccactggtggacagctaagagtgctcaagtggtataagttcacaaatacgaagtatacagtcgtggggatccacacatgtgcattgatacatgaaattccaatacatgaagttccggacggtaccgaacggtattggtcttatacgaggcgtatggatctatctgcatgtcagattttaaccagattgatatcatggagttattgtctgttcttggagtttgacaaaagttgcaaaaatgacattgtcagagtttgcgttgctctccaaccctacagccatcaaggtcgtcattgtagcatgcattatcactgctgtgtactgggtgctccgaagggcatatccacgaccactctcgggcatcccgtataaccaccatgcgacccaaaccattatgggagacctggccgagctcggggagaggcagaaagacatccagggaatgcggccttggttcctcgagcaggcccatcgccataactcggccatcacccagctcttcctcggaccgttttcgaagcctgcaatcctgctctcggactaccgcgaggtcaatgacattctgagtcaccgtgatgcggttgatttcaagcgagggaagaaggtggatgtattcagtggtctcctacctcatgcacacccggctatggaaactttcgatccacgtttcagagagtctcgtgatctcgtccgagacttgatggcgccgtcgtttcttaataccgtaagagctcatgtctccccaaatcccttctcaaaagcccatactaaccttgggccggatgataggtgaatgcacctcatacctacgtggtggcctgcaacttgctggagctatggcgactcaaatcccgatccgccaacggacaccccttcgacgtcgtgaatgacatagtcgaattttccttcgactccatcctgagtgcggcaactggactgggcccagaaggaggagatatcaagcggcaactctcatacctgcgcgacatggaagaagccggaactgacatctccctgccggacagtatgaatgacgaagtgacggtattcccatccgcagggacatcggacaaactggctgccctcacactgaacgaagaatctctctggaagggcttctacatgccctggcctcgtctctaccacgccatcaacaacctgcggccctcggtccgacattcaagccagacgctgagaggatacattgaatcccaaatcaagagggccattccccgattgaccaaggacggaaagcccgaatgtgctcttgactatgtcatcgcgcgcgagatcaaagccgctgaaaaaaccggccgcaagccagtgctcgatgacccacggatccgcgatgagatctgcggatacctgatagccggccacgacacatcgaccgggtccctgatctggttgatgcgccgacttctctcccacccagaggaacagaccaagatccgggagaacctgcgagagacatacagcgcggcatgggcagagaaacgtctgccaacagcggcggaattaatcaaacacgctccctacctagacgccttcttagaagaggtgctgcgagtgaactgtcccgtcgtgacgatcatggttcagacgagaatggataccgccgtgttgggctacgctgtcccccgtgatacccaggtatttttgaacctcactggcccgtcgctgaatatgccgtccgtgtccgtcgacgagagcagtcgcagcaagacatcgcagatgcataagccggctcgccatgattgggatgaccttgatcccaaggcttttcttcctgaacgctggcttaagagggatgctgaggggaagttggtctttaatgcggccagtggtccaacccttgcttttagtgcagggaaccgaggatgctgggggaagcgtttgggacagttaggattgagagtcgttctcacgattcttatctggtcggcaaagtttgatgttcccgagaagctcgtttcatgggaaacgtacgattcattggtcacggcgccgaagcaatgtctgatgtctatgacggagatttagtagtggtatttgatgtaatttagacagtgttgatttccattctagactgactcttttctaatgttataaaatgcgcagaacttgaaatcttcaaagcttgaattctatgagggcgttccactagtccaaccaccgagagatgttaacaccatcccacagcggacacagccagttctccacattttccactccatgatcagagcaagacttctctgccatagcagcaatgtagggattaaattctaagccggtaactttgccatctaggccgactgcatggctccaggccagtgaaagaaagacccacgtatcgagaacaatgcggaaagtttctatgttgcagataaccacacgtggcgttgataggtcgagaaaagtctctcttagcttacacaggagtgaaacaacgatgcaagcacatgcacgtccgagcacattggggctattaagtggagtcttataagcctatgaggggctctcggagggagctacgggaactcgggagtcaatcgagttcgtatcgggaagatcttttgcccagaactattgtgggccgtcggagaacccgccaggcgccccatcggaaaaaccccagttttgcctggaagatacgggcagctcgcttacaccatttgtttgttctgatattggttacgtcgacacctggccaaccggggctttcaggttggtacccacttagcttgtttagctacagattcaggcggctggtttcttacatacggatacctccgttggaatgtcggttttacgattctgttttcgtgttgtattgcagtcacgatgtgagattcatggattagattgacaacgtgccggttctcggcagtgattgatggcgctgacatccgatatgggctgatggaagaatccttatgctattatgctattatctaaacttcaagttcatctgcggtcttctcttgacttaccacttctacatccagttcaggaacatagagacaaaacattgctataatggcaccctccgacgcagaccaaatggtgtactcggactccgacatccgggtccatgtgtgagtatcgacgctatcctgtttgtggctatctgtttgtgactcaactaatatgactgctctttccataggctgaaaaacgccgtgaccggacgcctcgtccaccatcctgatcgctcctttgccatcgaagtgactctcgacctggtaaagggggccgacttcttctgccacaaaccgcctatgcacttccatgtccaagaagaatatatcgaatgtactcaaggccatctgggcgtggagatcgacggcaaggaagtagtgctgacggcaggtgatggggcgtacagcatcaagccgtacaaagaccaccgctcgtaccctctttccctagatcgacaagaaaaaggaaacacggtggtcaagttcctactatcgggcgagaagaccgacagtgtctttgagctgaacccggttttcttcgagaattggtaccgctatcaggatgatgtggtggtcaacggggccaagattgacctgattcagcttttcagcgtatgtcccccctcctccttcctactcctatcctcttcaatgcttgatttctcatgaatacagacatttgacgcgggtggcacgtacatctctctcccctggtggattccttttggacagaccgtctcacgcaccatgggcctcgtcgttggaagatggctgggcggactactgggttatcagcctttctacaggaagtggacttcggattggcctctggcttgccagaagatggaatcttcattttttcaacggcgatttgccgatcgctcgaagatggattgataaagcgattgataaagcaatttataaagtaattgatacatatcattcactcgtttgtgaaatagccgtcctagaactagactcaagacttcaatctcaatgcaaaatagccgatcatatcatccaagaaccgtctcaaaactagactcgacaatttaaaaaggcaaaatacccgaccctccaatctaaaatttattctgaaatagtcttgagaatctcatccacattcgcaaaggcgagctcttcgctggtctctttccagagctgctctgagatcttcttcccctcttcgctgtagataatcggtgccaaactgtaaagtatcttagcaatagctctaatcatggtcaacatagggataacttacggcaccaatttctggaaggacaggaactcgccatgggtctcctcgccatggttgacagctgcatcggtgaccattcgggctccaacagcagcagtgttggccatgcggcgcattacgatcttggcgatagctccggcgaaagtcttatcgtgctcacggttgaattcggaatcgaagacagagcccggcgaggtggcattgatgatggcaacggaaggcgggacaaccgaggccagatgtgccaggaaaaactgccctagaagcttagagaccatcatgcgatcgagggggtcaaccttggtcttcttctggtcgagcgctgccagcagcgggaagcttttcttctccttgaagggagtccatgcggcgacctctgatgagacgatcgtaatgcggctcggacctccttgggcagcgcgtttttccttgacgacagggagcaggaggattgccagcagggcggtggagaggtagttcacctggatcatctcatcatggcctgtcttggcgttgaagacgcgcgtggcgttggcaatgccgatattcaggacgacaatgtctagtcgggggaggctcttggtgcgctccgcaaaggcgacgacagagtcatagtcggactggtcaagcttccagacctcgatgctatcgtcggagagatcccggccagcggctagatcctttttagccgcctggcctttctcgtcactgcgcacagcgagaatgagcttgctgagtcccaggtcgaggagctggcgactggtctccaggccgacgccgatgttggatccggtcaccagggcggtcttgccctccaggctgactcccttgaccggggcgggtttcacggtaatctggttgtagaagaagcgaggcaggctggcctgcttttccggagtcacatcgaatttggaccccatttcagcgaattgaaagcggggtatcagctttggaaagtttggacgcaaggtgtgctggggaaaaaaggtgcccaggtggcgtgttttgcctcaggcacgtccttatcgatagaaagatttgtggtgagaaataggcatctgtgaggggtgttgaagagttactgtaatttgtgagagttgaatgaaagaaagtgagagttggttccaaggctgagagtctgggcccagtctcgaatgattgtaggatcgatctaccctaagccaaaaaaggaaagcatttacttgtatagattagactagtccgtattctgtatgaagccaggctatcgattgatatacgtggtcgcatgtccaacgtgctcaaatatgtgggtcacccgcgaaccatagcagcccgggaggcacccggccccgggggggagaagggggatcagcagaaggccggtgggaggaaaagtagaaatccgtatggacccgctgtaattaattaattttatttgcttatttgctgtatcgtactgtaattcatttatctgatctcttagtgctgatggcccccggggcggtgcataaagtgagtctatcttcgggaatttagtcctcggatgcgtgattgggaacaagctatgggcagagctactgtccaatgcgcatcgtaagattggatggcgccaagtataaaacagattggtctcccaagccatatctcaccacggcagccatttcaggtacctacagagatcatgcagctactgggtttcctgatcggggcgcttgcagcgggagctcaagcagcctccacgagcaatgtgaccaaattcacttcctttgcgcagaacctcgggctgtccgcagccaatacacgtgctttggcagcgcgatatgcaaaggctgacgactcggttgctatcttgaacgttgcatgtttgactgcgcagggtgtgcttggcgctgcaaatgttgatacatcgcctctcaaccaaactattgtggatgtaaactggtaggttgctatttatcggacctttgtatgttcgagctttttactgaccaatcaatgaaggtccgaatcgtgttttgcagagccgcactgcatcattcagcccgaggtagcccaggacgtttctacggcggtgaaagtcataggtttcttccaggtgaaattcgcagtgcgcagtggcggacattcgccgaacccaggatggtccagcattgggagccaaggtattctgatcgatttgtctaaactaagctctgtcagcctgtccagtgatggcaaggtagcgagtgtcggtccgggtcttcgctggggcgaggtcacggaggcattgaacccagagaaggccgtggtgctggggggaagactgccctcggtgggagtcggtggtcttattctcggaggtaagtaaaggtgtctattcatggacccaaagatgcagtctaatcaggagttacaggagggtatcatcacctctctactcgctatggcctagcggcggacaatgtgcataatttcgaggttgttctgtcaaatggaacaattgttgacgcgaatgcggagcagaacagcgatctattccgtgctctcaagggaggtggccccaacttcggcatcgtttctcgttacgatctaaacactgttccggtctatgaagtctgggcggaaatgaggtattattccaccgatcaagctcccgccgttctggatgcctttactgagtggcagctcaacggagcctcggatgtcaaatcggtcgtggctattgatatctctttgacctctatagtcattgggcttgtttactccgagccggccgtcaagcctagcgcatttgcaccattttatgatctggagccactatctattccggtccccggaatgaacaccacgtttgtcgttatcgatgaactcctggcatccgcatttcccactgcgaaggctcggtaagtaattcatcaaatcccgctccctcttcagacagaactaatgccttcccagacacgactatcgcggctgcagtacccgcatcaacgccaacttgacccgggatgtctacgactactgggtggagaaggcccaagcggcttaccaggccactggtgtcaaccaaaccttcgctctgcaatacgtgggagagaatctcatccagaaagggattgagaatggtggaaatgccctgaatatcccatctggcccccagcaatgtaagactcacacttctcatctgatacgaaaccgtcctaatgtcagctacagggtggaccactattgtggactgggaaaatgaggctgatgacgaggccgcgcgatccgtttccattgagacgacaaagtactggaagaaactggccaaggagcgtgggttggatgtgtccttgacgtacatgaacgacgcctcccgcgaccagaatcccctggaatcctacggggcgacaagtctaaagcagctgaaggcaacttccaagaaatacgaccctacgcagatgctccaaaggttgcagaacaacgggttcctgctttcgaaggcgtagggaattccagccccggggtccgcctctgtctgcactactgtataggtctcattaaagcgaatttattgggtgtacatggaatattaaaaccatatctactagaaaaccaacaaccaatcgcttcaaatgttttcaatttcccttggatacttcaatattccgaaattctgcctattgggtacgtaatagttccaaggttgccacggacaatcctaatattcatgcacgagcgagacaatctatagattccagagcactgactacacgaactagttcatatagtacttcaggtctttctcagcgaaaaggatcgtactatggtgccccgatcaatatatcagcctcaagcctgtgcctttcattggctctgccccctatcagcgtacttattgcgtgctactagtacccatttctttgcataaacttggaagtatatccatttgcacgcatgaagtagtggtaatatagataggtacggagtgaggcttcaggtattattacatacgagtactttttaataccactgtatattacacacaaccagtttacaatacatccgtggggcaaatgtgataggtcagcgggtagatctggaaaagatgcggcccctgaggcatccagtagatcttgcttaatcgaatgttggccccacgaggtaacccaaggctaatctaggccaaccgtggctgagaccttggaactgagatgcattccttcgcaatccttgcaatctatgtttcaatttcgcgaaccggttttatcagggaactgcggcgggtggatacatcctagcgttgcaatgatgataataggtacctacaacataagcagtaggagtaatcacggcaatacgatacccttgcattgccggtgtatctgtaaaggagttttcccgggcaaagtccgcgagtgtgataatgatagcgcactatgcagatacgatgttagcatcgacggtcttcatagtaaatgaggattgattctttggacttttttcggcattccctcaatcttgaaagtgctttctttgccttgtccattatggactctctacatgtgcttgctgcgaatgcggcagagcggccgactatccttgttgctctggtcttggtctttctggtattggggctgaagctatctccccggggaaagcagccgccatatcttagagagagaataccatatgtcaccaacactattcaatatttgacagacgtgggaacgtttttggatcgagtgacgtaggttttatatcatttttattttctaagaattatctaacaacattaagaacaactctggacaagaccaaaagcaacattgtcaagttccatgtcggtccgataccagcatacattgtcaccggcacgaagaatgtgcaaacagtatttagttccccgaacatcctagatggcaacttcctccagcttatgttgatggagcgccactggggaatgtccaaggaagaaatcgccaagtttgcaaacgacaaatccggtcgactgaaggccccagccccaggaactgagaataccccagctgagaagagattctggcgcggtcacgaccacctgtacgctgagtacctcagtaaccgcacgtatgcggatgccctcgccgattcattctactctctgttctcggagcgtctggataagcaatcgacgacggaatggagcaccgtcaatcttttcgagatgctgaagacctcgatggctgaaagtgccattatctcgctgtttggctcagagatcatcgatctaaaccctggtttcattgactgttactgggagtttgatgaaattgccggcacgcttgtctgggggcttcccaagttcctgcagcgacggtcggtagcgataaaagatcgtctacatacgatgaccaggaagcacatcgattccgcatgggaacactttgactggaacgggcccgatgctgagtccaagtgggaaccccattttggatctcgtttgtcccgggagacagcaaagtggctgtctgaaggggggttctcgaaccaggcggccgctggacatacgctggcttcgttatttgggtgagctcttcgtgatacttgtacatgatatttgaaaaactgcgctaacgtttatcaggctcaacgggaacacagtccccgttactacatgggcgatgatcgagctgatcaaggaccgaactctgtttgaggctgtgcgcacagaagccatggaagcctatatcacggatactaacaccggagccaagcggatagacgcacaaaagctcatcaatcttcctctgctgcagtctctctacattgagattatgcgtctgcatgtatctttcaacgtgacgcgcaaggtgatgcagcccatccaggtagacggatacatgatcgagaaaggggccttgttacagacctgctcacagattgcacactacgaggacgctgtctgggccacctcggagcatcccgcctcggaattttgggcctggcgacatgtacaatatgtagattcgcgagatgactcaactggggagaccactcgccaggctcaatttgccatgaaggggagaccaagctcgttcttcccatacggtatgtttctccttctatcctacgacgccgatactgactggcttatcccaggtggtggatatgtgatgtgcccagggcggcattttgccaagcaggagattatactggccattgcagttttggtgacgaaatttgacattgagtttgatgaatggctggactctactgggaaatcctcggacaggccggctcaggatgattccagatttgctggcttcatcgctatgtctccggatcgggagatgagaatgcggtggaaaagacggtggtagtatctccactaaacaagatcgaaagatctccagggcttcaattcattccaaggttgaatatattgaatatcattgaaacccattttaagaacacacatgtgcatgcaagttatgcatacagcaaaatgaactttttcctgctccaattgtatgtcagaccgctggcgatcggggacgaatgtctctccagtgcgatacaattgtgattgtgaccgagaaaatcactccagaagacatccggcatcaagcgagtctgtgggagctctcttatgctgatagactcactatcctggattcacgtgaaaggagccgatgctccgatgccgtcgcgtttgagcccctgcatggtctgattttggaccatcttccagacacttggaatgcgcagaaaaaggaatatcgactattctcggcatcgcacatcgcacatcgcacctcggtgcgttctagaagctgagcctgcaatacccactgcaggtccttgataccacaccgttcgacctgttggctcacgcgcggcgcaattttgccaaggccccgaccatgcgtgagtctctgtgcgaaggcgtacgctcgatgtcggttgatggctacaccgaaggaaacctgtcgcatctgctctcctcatggatgcgtatccctcaagatcgatcccccctcgttgaacatgctactgacttctcaggattctccccggcagtcttgataaaaaagctctatggggagtggtggtctgcagagcgagaaggcaagggcattggccgctacgaacgcgcattgtcgcggttcaagcagtattttgcgcagctatgccagagatcatcgtcgagcattcgaaggccacgctcaaccgcctctatagccaagacggtgagaatgcgctgcggtcctctgttgtttgttttgtttgtctgagccgccttgtgtgacacgtgtgtcgtgatctttggacacgtgatctttggacaacccagccagctcgggctctaccatgtcgacgtccatgttaccacgacaaccagaatgaagaatcgcatgtcccaactccgggcccttgcaattgggaaagtatatgttgtagaatatccctccggatcataagttcgacgccgttctgaaacttattggcgacagcactgttgttgattcaccccagatggcgcgcggaggaggaccgggttattggtggatttccgcctattccgaacttcgatcctctttcgcagatggcgtgtggggttcacttcagcttctttgggagatttgtttgggaacccctgagtctcctttgctacccccttaagttggatactagcggcatggctatgaatgtgggctcaatagaatgaaccggatgtcaatatttccgaacatgtctcacgccaagcgactagtgaaaatgattgaagtgaataatttttgattacttttcgagtctagcctttctcgattgaatattcatggtcagctatattgtagtcaattactccgtatagctcctcgtaggtaccttggatctcgattagacttgccagaaccgaagtttaaccgcaggagactgaacttcgccctggatcagatccgtggaattcgacatggccacgcgtacgtacctggggatgacgcggtcgcccggccatggacaagttttaagcttagatcttggatatatgggaataaaccttagccgacggcatcaaactcaaaaaaagttaatgtccttctcgtccatgactggtccttttgaggacatgaggtactccgtaacccttaattcggaaggctgaattaaactacacatgctaggctatggggaatgacccatttcccttcacgctctatctcgaacctagtctgagctgcgccttgtgccggtgttagatgatgacgactgagtatccacgcctatcctcgattcccggtcaggtttcatggtttgattgcaggcaacgcaacggcttaaagcatgatctgcgctttagttactagaaactggagccgttatgtagagtacctgaagatcttataagtatagcctctggtctttccattttattttcttgacacttatttttccattttatatctattcatttgatatacctcgacatgcgcgtctccttgggcgctgctgcagccctggcagcatcagcaggtgctacttcccttgctgatgtctgtaccgtctcgaatgtgcaggctgccctgccctccaacgggactctagtgggtatcagcatgatcccctctgctgtgacggccagtgctgtctacaatgccaccgctggcacgggaagcaccgagacttatacctactgcaatgtgaccgtcacctacgagcacaccggcaagggagactccgttgtcatcaagtatgccttccccaagccctccgatttcaagaagcgcttctacgtcgccggcggcggtggcttctctctgtccagcgatgcaaccggtggtctcgagtacggtgctgtcagcggtgccaccagcgcaggctatgatgccttcaactacgcctacgacgacatcgtcctctacggcaacgggagcatcaactgggacgcaacctacatgttcggataccaagccttgggcgagatgaccaagatcggaaaggtcctgacccagggcttctatggcatgtcttcctccgccaaggtctacacctactacgaaggctgctccgacggcggccgcgagggcatgagccaagtccagcgctacggagaggaatacgacggagccatcaccggagccccggccttccgtttcgcccagcagcaagtccaccacgtcttccccgctacagccgagcaaaccctcgactactaccctcctccctgcgagctggcgaagatagtcaacgccacaatcaccgcctgcgatcccctcgacggccgcaccgacggcgtcatctcccgcaccgacctctgcaagctcaaattcaacctgacctccatcatcggcgaggaatactactgcgccgccgaaaccagcacctccctaggcttcggcttcagcaagcgcgccgacggcaccagcacctccaccacccccgaacaaagcggcaacgtcaccgccgagggcgtgaaagtcgcacaagccgtctacgacggcctgcacaactcccaaggcgagcgcgcctacctatcctggcaaatcggctccgagctcagcgacgccgacacgcaatggaacaacgaatccagcaagtgggagatcgacatcccctcgacaggcggcgagtacgtgaccaagttcatccagctcctcgacctcgacaacctctcggacctcgacaacgtcacctacgacaccctcgtcgagtggatgaacatcggcatggtccgctacctggacagtctgcaaaccaccctaccggatctcacgccgttccaagcctccggcggaaaactgctgcactaccacggcgaatcggaccccagtatccctgctgcgtcgtctgtgcattactggcagtcggtgcgcgccatcatgtacccgaatctgtcgtcccaggagagtctgaaggaactcgccgattggtaccaattctaccttatccctggtgcggcgcactgcggtacgaattctctccagccgggtccgtacccggagaataatatgcagactatgatcgactgggtggagaatggtgttaagccttcgcggttgaatgccactgtttcgtcgggtacttatgagggcgagacgcagatgctttgccagtggccgacccgtccgctctggaagagtaatagcactttcaagtgtgttgatgatacggcttcgattgagagctggacttattctttcccggctttcaagctgcctgtgtactaggttgtatgtacaagggagctttgagtatgccaaggatgtttctctcgcttgaggtattttgggtttgagatgatcagccctagttcagccctagaagtctgttttgaccaattgggcattatactctagttaattatattctgtgaatgcctattatttctatcatctgcttcgtcttatagttagtgtggtcttgatcattaagcaaagggttgagcactgcctcaatggtgtcccgtcaggggtcagtttttgaatgaatattattagacccattgcacaacattatgcctaataacttctcggattgcaagtaaaggtatgaaaaacatgcaataaaattagtctaagaacgcgcccacaatatgggctattccgatttgtttgagaattttctaattttaaaagattttttttctataaacaacgacatatctagaaagaaatgatttgtgctttgtaatttgtgctttgcaatttgttcagcatgaaaactccccataaccaaaaggtatatccaacttaaacaccaagaatcagaacccgagccacactctaacccagagtcagagtgtaagcggcatcgagactgcaagccagggtattgacatcatcaggttgctggtaggattcaacgcagtcggcatcacccgcagcgcaggtagcggtggtgcaggactcatcactgatggtgactccgaatccagcagtgacgaaagtcgaggtcttgaccaggttgatggaggacaaatcccagaagaggatgtcaccggactgggtgtactcgaactgcaggacgtcgtcgcagacctcggtggtggacatcttgatggagataccgccgccgttggagttggtgagccaggtgtcgctgaaggactcgccgggggcgacggtctgcatctcaccggggtcctcggtgacaacccacaggtagacggtgtcctcgaggttgttgacaatggtgacaccgctgccggtggcggtggcggtggcggtgctggccgaggcggtggagctggcataaatgctggtgctagtgggcacggagacagggacgctggtcacggtagagataacgggagtcaaagtcgagtaggcgacgacggaagtggaggaggcactggcgacctcttcgacagcgacggcagtagccacgctgacggtgctgccggtctggtagacggtttcgtagacggtctgccagacggtctcctcgatgtagttgtcgtcggcgacggcaatggggcgggcggaggcagtcagtgccagaagggccgagagggcggcaatgttgaagcgcatattggctggatgaattcgatattcaaaggaaggtgtttgatagacagtgagatctgggtgaaagagggactttgatctgatctacagactgttaaagagagtgatgtgatgaggctcagccccaagaggtaggaatccaaaggagtgtgattcgaaagatcgtgatggtcaaaggagagaaagaaaaaaagaggagaagacggaggatatagcgccattttattcttaggggtggagtacgtacgagggcattgggcgtgtcagattttcagtgtggcggccgtttgataggccacccccattgaaccgccaaattgggtttggccgtgttgtttccatgtggtcggtgcctgactagacgagaccgtcctgttgatcccattggtagccattgctggggtcaggcacagcgatctggtccgaccaacccgaatgaagacggccagcgaggttccatggatgggccagttcctgagccacgatttcgccggcgctggtcttggggattgtgacttgttccttagcctggactgtggagatacgcgccaggtctagatcgaatcagagtagacagcgcctgcggacggaaagttctcaattgcgcggacctgcccctgaatatctttttttaatgcctacaatctagatcactataagtgactctggcattgtccgggccaagagggacttaatacaagcttatattttagaccgaaacggggtgggaaggagagtagattatcgccggagtcttctttgtcctccgttggtgccagcatggccagactgtggatccaaattgagtcactccatggtttgattaacttttctctcgggtaccctacggggtacatacatgatcaggcacaggcacatacatcgggaatcgcaccctctggacgccacttcggtacatccagacgggttcctggaaaactctgcatcctgccaagccgtgataggtggcaatctatacaccacacacatcttgaatcggtaccggtcaaatgcactagaatcccctatacatccatggacgtggccattgacccgccaagccacaaccccgctcacaaacccactccgaaaaattgctatgttgtacatggcgtaacagtgttcagggtgtggccccgtaggctacatcattggggaagacgtgggtttttcgggcagccgacgtattggaaacacgaccgtcggcgacaaatccgtggttctcaggccccgtactgcctgccaacggacctccccggctgtacgtctcgagcgcattaaacacataaccgaagacttggcggtcaacgtccgaggcccacaaaaagtctagatgctcgtaggtgggaatcgcctgggcgacagtgtcatgtggcagcccctttaacatcacgccgatatcaacgaggctatcgttgtcgccgtacagcagcacaatgggggttttgatgttgcgagtagggtatttgaccggcttgtaaaagcgctcgctggcggcgacgctgaacggggcatagagttcatcgtcgtagaactggaaattcttgttccgaatgatctggaaccaatgcaccacagacttggtgctggtgaaggagtatagatgcaaatacgcagcaagcttttgtgtttggctgatgttgcggcatttccagttgaagagggcttggagcgctgtgtcgataatgcgcacgaagatcggcgggtacagtatcgtctgccacatagttgtcgaggaaagaatgctgcgtcgaccgaacaacaggaacaaaaagtccggagaggctttcataagtgaatcaacaatgcggttgcggaggcccgaaggagccatggccggcgcaagtgccacaaacacatcaatcttctggttgagcaatggatgaatagcgagcgtagcgaatgcctgcgctgtcccctgggagaatccaatataggacaatgacggctgatcggtcacctcgaggatgtactcgatgctgttggggatatcagagaaggcgaactgatcgatagagaaatcccaaaactcattggaactcggcgagcatcggatcgacttcttggagtatttatttccacggttattccccagccatacatcgtatcccctttccaccagctggaagggcaggcaccgttgctcgtctgtcaaggctacccacacctcactggacatcatcaggccgtggtggaggtagacgacttttttccgaagcccattgggaccattattgacgcgcattttctcttctccttttcgatatgctaaccgatgaagtccaagaaggtagccatcgcttgtttgtacaatgtgctcctcggcttgaaatccgaagagtgcacatatctcggtgaaatctgacgcgtctgcaatagtggtggcaaatatctcctctttggtgcgcttcagccgggattcacctggtattaaaaggttgaaaagcgccttggattggccatagcagaatgtgatgatagggccagctggttaggggttaatattggtatcatccatattcggtgattttactaacgaaggcaccaagtaatcaagtgaatgattgtctcaagcagaacaagaaccaaagaccccaagagggctatatactcatacctagacgtgaaggtcagttgctgcgttcttcataaaagctagagttccttaccagaacaatctcccgatgaacggaactcgcgacatgatgagcaacaattgttatgcatatgtgcaggtgcacttggatactctatactcaagacaagaaagacagagatgctgcaacgttacgtttaaaagcgcaaacaaacgatgaatgcccccgacgtcattaccaacatgtgatagcgatgcttatctcatccggggattcgatctatcaaccaatcagcgtcgagataactaacggcctaaatttgccgtacggtctcgttcctcgctctcttgctacttgtggttgcgcattcgtccacaaggtcgcgtcaacatgcccagctcatgcaatgatatccgtacgttacatctccatgtcgcacaacgttcaaggaagggtcatgttcctggccccgctggactctctaccgcgaccctccgttgccataatgcaaactgaccacaatcgattatctagggcgggccctggctcaatgcctccaggagtctgactgcatcatggtccagcgtcatactccccgtgaatgtctcagctctcctctcgccgaggagttacccgtgaaatgtcagcagttgcggaaaggattcagcgagtgcaagtgagtcaggaaccgggccgaccattatggacaaaccggacaccctcgctaattattgccctttctcggaacaggcgcggtctgatcgatatgcgcaagcgcttccgcggcaaccagcctatctcggtatccaaggaaatggacggcgggcaatctacctctgggggacagctatatgccggagcgcccgcgtaccaaacggtcaaggaactcagcggagacgaagtgcagatggatccagagaagacaaggggcctgtaaaaagggtatttggattcgctgattacatactggcatggcccggagttcggttacgcttaaaacatacatttcctctctgatactcacattctcattcaagatcgactgagcttcttatacccaatcgattatatatcacaccttcactatctctcgcagaacatccaccagacggtcgggcatactcaggaacggggaatgcgaactcggcaggcggtaggtagtgcccggcgcatccattttcgaggcgaagaactcctggagtgctggcggcaaggcctgatactgctcgcagatgatgtaggagcaggggacatcgtgccacggctcataagtgacttcgcccgagaagaccgcacgtgaggtgtgcgctgtcgtgcgattccattttttgcgctgctcgacggtcaggtcctgccagccaacgttgtcgatgccgtcgacgtgaacgtagtcgtcctttttcttggtcaacttgatcttgacaatattaccgttcatatgatgcatggaccaacctcgactttcatccagggtaaataggctcatcccagcatgtccagcaggctctgtcctttttccagcgcaaaggcagccaggtaaacaaccctcacaatgcctccaggcttgtcactctccgcacgaacatgctccactagaccctcgctagctgtggaggctacaaaaccccgtaggagtgtgccgcaacaacaatgtcctttccctcgtatgctagagtcgttaacactctacgcagcgagacaacgtcgtcttctaatgtcagggaaggcggctcagcgccgatagaggggggcgggaggcattcagaaggataagtagggtgtttagacggtcacgcacggcatcgaagacgatgggactaacccaagcaccgattgagaagacgaaagtcggtctatccatttccatttccagtttatgtacaggagggcaacagcgttcgatgggaaagaagatatgaaaatccaggctattctccagtccttgagccgttatacagaagcgaggagcattactactgcttcgggcaagctagtatcctcatgagacttgtttaggatggactgaatggcccgctgtggatattagggaccaacgacagtcaaaccggcttcaagaggaatatgaaacatgtagttagtcaatctcacccgtttcctgtattctttaggctaattcacgtcctatcagactcctgccctcttttcatgcaagaggccaattgcggtcattagtgtcgttttagcggacatctaccgtttcacggggttgatatagcctggactctacatgtaaagcttgacagctgtaggcttccaactgcagggaggtggaaggaaaaggaaggcaaggagaatatctatcattgagaattggtcatctttggacctaatgtgttcattcgggagatcaggatcatgcaagaaaattgaaatcatggacagtccaataaatataaatctactgagtcttcttgagcttatcggccacaggggcagagtagagccagacaaccacgaaagccaagaatcctccaattaccgaccaaagaccggcaatccatacccagccgccggtaatagcccagctgcgcgggtactcgtcgtgcgcgaagtggcggttggtaacctcaagcttctcctcgatggcggtcaagaagggacgcttgtagttgacgcggaaggagaagattccgtgttgatcgggagtcacgaactgagtgctgaacacagtgctggaatcggtgcgctcgaccggttccaggttcaggcggtggaagggcgagagcatggtgaactcgagctggagcgcgtcgtctccaggtagttcaaagggaacccacttatcgtagacatactcggaaatctcaatgctgtagatctgcaggcaaataaggctcatgttagcttggaagagaatgacaatatattgtttcacgtacagtctcgttcttgatccggtagatcgaggggttcaactctgcgccctcagtgataaggcgatgctcgaccttgtcaaccttcaggacaccagtctccttgaaagcccaagcagtcaactgcttggcgaactcgcggttcacggtaggtgtcttcttgccgctgggcgtcttgacggaggccgagaaccacttgtcctccagcgactccactgatccgagaacagtgaagcgggcagagttacgtgcctgcatagcggaaatgatattcagctgcgacccggtagccaggatatcctccggcgcgggcgtgccctccttggggttgtagctgtaggcagtggcgggggccttgagaatcggagagagcagggcgctgtcaccgagagtctggggagcaactcgagggagagcaagaacaccctcaccatcaaagaaggccttgacgtcagaacggaggggtccagggcgctgcaggacaagaacgtcatgcttctcagcggccgagagggtgtcatagttgaagtggtcgacaacaacttgtgagcgatcgttggataggtgaatatcgagttcgaggagaagggagctgatggcgctggaggtggcagacttgccagaaagggcgaggaggatgtttccatccttgttcataaagtcgacgatgtgtttgggggtcaaggaggggccgaggcctgtattcttaggtcaattgactagacatcgaatcaatagtcgggtttgcgcaccttttgacttgggagggaagattagaaggtggtcgtaagctctttcgccaagcttgaacaaggcaagctgttcactcttggaagattcgattgagacatcgtatcctcgtgctggagtccgagagttagcaaaggatcaataaattgagtcagattaattaccttctaggtctgcccacaacgtggagtacaggtccttttgttctgtatcttccaaaatagccaacaggcgactgccggagctactcagcgcatttaccgcagccaagaagcaacaaataagcaacgcaagacaccacctcattttgaacaaatcccgcgcagcggagcggaaggatcaaaaagaaggaagtgaagaaaggtggttgaagatccaagttgtatacatagaaagggcgacgtgtttaatgggcgagtgccaagacccgagagcgctgggcccgcatctccgaacttcgacttcacctcgtccctccagcttcaattttgcttctctgatcctaaccactcaacaaccactcagtgggaccggtgtatctgttcgttcgtgcgcgcttgagcagtttttttctattctaccggcattgccctcccacccacatcgcaaaaccccgaccggtcgccaacgacctcctcctacagccatgtctgcccctctgttctggtcgacccccctccgctatatccgctgggctgcgcacgagaagccagctatcctcgccgctctgtgcattggcgtcatgggccccatctcgctggctactattcctcccatccgccacgccctcggtgacgtcgaccccgagcctattcctctgacatatcccagtatgaacccattcacttccaccaaatcggtgcataagtacaaaacccatattgagtaatttgaatctgaccattatcttcactacgtacagttccgcagggtccgcgggtgatccccaagggctacgatgacgaataaacgggttcggaactacgaaaatgtcaagttagagagaatttcgtgtattgtccgagctttggaggaataaattcagcggatggcgggagatgagttggctgtgccactggactgatgaacaagtcccatcgcatcagtgtgggcaatcgaatcgacttgttccgggcaacttctcctggccatcaacatgctttgataccaatatttgttgcgcatacgccgaaggtcgagctcggcgctacagtgtatgtactatgttttgtgcaataatcgacatcaagtcgctttctaggtttcaagtatggggtatcttaggaataattgcattcttgcgcacgaacagccgatatggtttccccaccaaggagagaggctgctcgccagaattagtatctgtaatacccgatcaattgcagaatttgcatcatactccgaagctgcagcatcaggtcggacaaaaaagccagcaatccaaggctgtacacaaggaagtaaccatcacaaattaatccctttcccgccttttccgccgtgtacccaaggagaagatacataaaaaatacacctaataatataaaaagactactgaaaagactaccaaaatgacaagaccgcataagcggcctactattcttgtttagatgacatcttgattactccgaggtaacagtatgcagagaaagagattcattaagatcatggagtcaatccaagaactcgcacatcaaaacgtcaatcacagaaggaccaacgccgcaaatgctcatatctacatgtaggtcaccggccttagtttatccaagcacatcgctttcgcaaaccaaggggaaaaaaaaaaaaatagaacgatgactccccttctttcaagggaaagacaaacaaaaagaaaagttgctaagaacacacaaatccctatacaccgttaaaccaacgaaaagtatcacattattgtggggtgggtattcccggaatccgtgagagcagagaaacaaacaaaacgctcaagtccgggccaccttttcgtaaacgcaatcaagacacatcactcttactcctggctggccagttgcagaaaagcatgagagaaatcaagaaggtccacgggaagtccaagctcctgccacggagcaatgggttcaattccagtgaagtccatggtataaaaaataaagtgagattcatatccaacgggaggtggaaagttcccctgactggagacaaattgggaatatgagaatggtggccaagagagagaagaaaggcgtgaagattgtccaggagattttcacagacatcaacattattcctaggggtattttggagatatcccggaagaaagcatcaagtagaccacagtgtgggtggagagaagggagaaatcatgcaggaaaacccttggggtggtcattcttgtttaccgccgacggtgggggttgtctctggttgcttgtggcctgcgctcatattccggagtgtatctgggctccattcctatccggggatccggggcagttgtggtaggataggacatcccagacgttacagtagagtactcctgttcggcatcatatccaggtcccgagtatcgtggagcattgcttcggccattgtcgtaaccatagcccgtgggggcatatgtatacgattgagggtgcatgtccgcagacgtcacaatgggctggttggaaccagagtaggaaacctggggcggggggtacggagctgtacctgatgcatatggcgagtgagtggcggatgtgtaggatggagggttggagtaaggggtattctgggatccactgtaggactgggagtagggatccatgtattgctgaacgggtgctgcggtaaagggcgtgggggacgggccctgtgactggcgagtctcatgaacaggcgcaggagcatagttcactggagcggtgttaggtgcatgggaaacgttcgtgtcttgaatgtaattcccacgcgggtagcctaggtcagcccgacgtgagacgtccgcctcccagcgagcggagtcagccttcagatcagtaatcatctcctgtattcgatgtgtggttagaatgccatcttcacttctcccgcttgctgtcgcttgtccatagtcacttacagaggtgagattccgataggcgcggataaagaatcctgggcggccctgttcatggtcagtcaaaacggccattggggtcatcgggggcacgagcggaggacgcacattgtggttgccaggtctcacgagggcatcgtttccaaggtagcggcaaatatctgcttgaataacttctcggctgattccttcaccggggatgaaatattcattctgacgctccgggcgtccttcatagcggcctgtcataatgtattccgagggaggaatatccggtttaaaaatttaaagtcctcggatccaaagggccagagaagagggagtccggagtctggaagatggtttgagagtcccgggaaagttgatggatggtggtgagtccgtttttattgtaggatgtacaaattctatcgagcaggttccagagccgacaatcaacgacttgaatggtttcttttctcgcttccagggcaagcagaaaacgagatatgatccttgggaagtggccagaaaaaaattgatcctggtcgcgaataacagtccgtgggaaagtccggttaatcctgggaagaaatcctggttgtccactggtagcaattatcctgggaaattgagaaggcctcaaaaaagacggtgatagcgacacgaggttgggaagggagaggatgggttgtcagggtcaattaggagaaagagaaacacggctgacggggtcctgggatatctgtaatctgttcggggcgaactagatattgggagaaagaatagttgtggcaagagaagccaggggaatatggggagaagggagagaaagacgagggagagggagagaaggggaagaaagaagagggggggaaggtaaagtggacatcaaagggccagggcggttgggccgtcttgggctggtgccacgactccccactgagatcaaggcaaaaagcatgcaaggtcaaatgtggattagactaatgtgcaaccctatgtctatagccgcttgagtattttaattggtatcatttatatcatttggggccagggagataggactttgtacccggtttcatataaacatgtatctataactatatacttccctgatcaacacccccgaaagtgtgaatgtacacagctatacggagtggatccctagagacgtcccttgtaccctaaaactagaccttaaaagggctgctcttgggtttcactcaattttagttgggacgaaaaaataagggccgatcccccatattcaaccagcttggattgctccctagtctgtgcccctggaccggatgaatatcgaaactctacaggactccaccggtggatctttagccttcagcagcggtcaagcaggactgctcagaagaaatgagatcataaaagctgtcagatgttcatatgtacggtggtaagatggcagtgttgaggcggcaaatcatcagactcaattgtgattgatccctcgcacaccatctgcaaagggagcatgacagccaactgttgacaaaaagacggtggcgacctgcgaacttgccaccgaaaactggtggccgatgtccacacgagattgccgttgggcaggaatgcgtggctttgggcagctgcgcgaaggctccgagcttctggtccactcacaacccgccaatgtcagctggatcgcacagatcggagatcccctgtctcgtttgtttttttcttcaggttcgagactgtcgtggacgagttacaacatcggaaaaatctgcacgagaacacaacatctgactgtgcaggagtgggtgatgaaaaataagcaggcaccaagtgatgggtcatttggacgtcccagaatacggagtacctgtggatattgaaggaattgcggctgtcttggacatgtttatgttgttgaagaagattaaaataagtcttggtatgtaagatgtaccccgttgttctacggagtaataaattggactgaagattgcagttgcccctgagttcaggagacctgtgattagtaatcgtacacaaccatcgctctgccgccctcgaccgcctgttggtgctcagctttcagttacattcaggtacggacaagacttcctcaagaaccgaaagactcgggtctcctgcctccacgggcactccttttctgagaccgtacgcctggaagatgccaacgacccttccaaccttgactgcccgcttttgagactccgtgacaatgcctgcggtagcatagagggtctcccagagaaccctccgtaattcgaggtgacgggcatgaaagtgccagccatctgcaccaaaggttcctagcaaggtctcaaggccccaaaatgacaatccaaaaggaccaacagtagcatcacgccagtcgactatactggcaatacctcctgtactcgggttgacatggatattcatttcccataggtcggcatggtttagcacctgcggatagtctagggcgaaaagcagtggtagttgatcgcggacctcggacctcggtcagcttagcacgaaagcgctcaggaagagcatcagcaagagtgtccagcctttgctcacggacttcagtcagctcggcacgaagcgctcaagagcatcagagagtctctaacctctgggaaatctctacagaagtaacggctgtgtctatccatggcgtcatatcgattccactagtccagctcgacgcgaaaaatctagaaagttaggtgtttatcgcaggcagtgtgttcaagaacactttgcaagatcatatacagtcctctcaagaaggctgtatttattcacagcgcaaatctcgcgttgggctatagagaaagcgaccccttctacaacatccatttcatacacgataagagggcctaacgagtcgcgtctcccacagccaggggcgaaatctttatacatgcttttcactagtgacatgaccttcatatcaagagcggcttcaggggcgcagaattgaatagctttaggattgacactggcaataaccgtatagctcgtcatgccgtgtgccggcgtgggagcaactgatccacctctggtaataagggcagcagtgttctcttgtgtgatagacttgtttttatcaaaaaatctggcaatttgatgattagataaagcctgaatgccagctgcaatccaccatgtatctagtgatatccatcgctaggctggctggtttcttggttggtcaagtcgtggatgtagtatgcgcgagcagctaaaagaggactatgggcagtatacaaagcacacggtggtaggacagacttatacggtatgttggaagtgttccagggtaggaaaaggttaaatggtgcgcttaaacacagaggagaggggtcttatataacgaaagtttccaagtaattaatatcattcacaagcggccacctgaataactaacacaaaacaatgtatgactcaacttacaaccctccagggctgctgtatgttgtagtctatagaagagggagaacctcagggcacgtgcccacactagtccattttgggttcttgtcccaaggtgagagcatcggattccagctctgaccgacaaccccatggactaatatttaccgtcatgacgcacgtgcgagcatgtccgaacccaccgagtcgtccgatcccttgaagctctcccggttcacctatcgacaattgcaattgttacgacagggatccacggcaacccctctgcgcgtgattgcgcatatcgatctcgatgccttctatgcacaatgtgagatggtccgcctggggactccgcgggagaccccattagcagtgcggcaatgggactccttgattgccatcaattacgccgcgcgaccgtttggaatcagtcgattaatcaatgttgcggaggccaggaaactttgtccagacctcgtcttacagcatgtcgcgacttttcgagagggggaggggggacggtgggcatatcgggatgattcgttcaaaaatattagcacggacaaggtgtcgctggatccgtaccgagcacaatcgcgaaagatcctccagacgatgaaggaggctctggctacatggagtgtcgatgatatggaaaccgaaactcagaatccgatctcggctgggttggagaaagctagtatcgatgaagtattcattgatttgtctccattgatatatagggcacttcttcggagatatccagaacttcggatgggaatacaagacgagaaccgggatgcacaacttcctataccgccgatcacagctttgcagtgggacaccgactgcttagtggacctcgatcaacatgaaacagaggaggatgatccagactgggatgacgttgtcatgctgataggatccgagattgtgcgatgggtgcggaacgctgtctgggagaagctcagttacacttgttcggccgggcttggccgcaataaaatgatcgcaaaactaggaagtgcgtgcaacaagcccaacctacaaaccgttgtgcggaatcgggcggtgcagaatttcctaaatggttataaatttacccagatcagaatgctgggtggtaaactcggcgatcaaataactgccgcatttgggacggagaaagtcagcgagctccttaatgtaccgcttgagcagttgcgcactaagctggctgatcaaacagcatcctggctttacgggatcatccgcggtgatgatcgcagcgaggtcaatccccgaacccaaattaaatctatgctatccgcgaaatctttccgaccgagcatcaactcacttgatcaagctgagaagtggcttcgtatcttcgcagccgatatatatggcaggcttgtggaagacggcgtgcttgaaaatagacgtcgtccgaaagtgatcacgatacaccatcgaactgcgcaatctcgttctcgccaaatcccaatcccaggctctaatacaattaatgagaatcttctctacgatctggcgaatactttgctccgtcaagttgtggctgacggacaggcatggccctgttccaacctgtcgttgagcgtctcaggctttgaagacggcgtggccaacaacaaggctatcgaaggcttcttgattcgtggtgatcaagcgaaagctctaagtcattcttcaagaccccgagataccgataattcccccagcgaacaagccccaacggagaaaagacgaaagcttgaaggtgacggggataagatcaaaagtttcttcgggatcccatcacatcttgaaactcctgccacagacgagccagctagcccccaagaacccgctgaaaaagactccgaacccagcgggattccccggttcgtatgtccacggtgctccaagtcgatgttcgagcatgaaaaagaagaacatgacgattggcactttgccaaggaccttgcaagccaggacagagaggaggccagggtttcacagccgccaccgcctacgaaaagtagtgcacgcggtacaagttctcgtggaagaggtggccggggtggagggagtcgggggaagcccgaaaaggggcagatgcgacttgctttccaatgacctatgagcctatgttgtatgtcttgtttttttaccatgtttttcataatctgcttttacttggcatagctacgatatacccaatgccacaaatttatgccatcgcctgattgggcggactaatccaaagttataccttgaaacgtcgattcacaattaagccctttcccgccttttccgccgtgtacctaaggagaatatatccataaaaaatacacgatttaattaaaaagagatcatgacgttctcaccgactattcttctatctcagaatttcgcaatgtcaacataagacgtcctgagatatcttggaatatccctgggctgtagcctgtgagtgcctggaagtggatcggatgttaaagtcggtgtataccaggtggaggggtggccttgagcagaagcacccaacaacccacgtcaggcaagctttgggcctctaaggacttcgatgacgctaagcatatgagactccaccgagtacatttctgaagcccaaaatggcagtttgagagaagagaaccaaggttctggcaggattagctaatattctggggtagggccggagactggaagacctggggaataaacaatggaaacggggaatctttggaagatctggatgggaatgatgtttagctacatatctcgcaaccgccctagtgacatcagccgcggggccgatgaccactttgcttttttccagggttgtcagccttcctcaaaacagttcacgtttcatgtatgtgtacggaatacgatcagttggttctcgtctacctatattgcttgtcgtactagtatcattagccgcttaactgggtgatcttgactagagcacagcccaccttcctttgcaagccccaccagtcaccaactggatttatctcttgccttcaactgaaccctttgacaggctcctgcgagcttgaactaagagtcttctccatcgtggtcgagtttccgaccgtagctacaccaaatccaatgcggtgatcactcgcacagtcccacaatgccccgccgaacaccaccccgcgactacgacgaagaagatgacttctatgaagttgaacgagagcgagaccgccggccgcgccgacgagatcgcgactatgaagatgtggaatttcgtcgtcgaaggtccgagccgctagctgaggatatggagcgtatgcacatccgagaacgtcccaggcgagacttcatggacgaaagctttgcaccgccgcgagcacgggatgatgtggttcgcacgcggacaaaggaggaggtcgatattgtctcatctgaccgcgacgatgtctccacgcggccatctgggccccgtcgtagacctcatttccgtgatgaagacgacgaggatcttgtttttgaggaacgagagacacgccggggcagtcgacgtcatccacgcgaagttgacaaggattttatttttgaggagagagaaaggcggccagagaggaggcatcgtcccgggcgagagcgagaagttgaagatgatcttgtcattgaggagagagaaagggaaagaggtggtggtaggaggcgtcgttcagagccgatattcgaagaggatgaggaaatcatctccgaacggccaagacgccgagggagcaggcaccgttcccgggaatctgaagaggatgatctgatcattgaagacagagaaatacgcagggggagtcggcgtcatccagaacgaatgtccgaggacgatcttctcgttgaggagaaagaagtgcgccaccacaggcgacgtccagaaagcggattcgaagaggatctgtcagttgaggagcgggggaaacatagaggaagaagacgtcgccccgagcgcgaatttgaggaagaggaagtgttcatccgacggaaagaaagggaagagcccccgttagatcgcggatgggaaagtgaaatcgacgtgcgatcgcgcgaaaggatactggagtttgaggaagaagacccataccgccgacgacggccacggccacggcctccgcctccccaaacggtccaggtggaagaggtcatccttgacgatgcacccccaaagcgacgccgaggaccagtcgatttttcagatcgagaaattgaagaggatgtggtcatccggcggaaggacaaggggccacgaccagacgacagtgatgacgaggagaaaatcgtcatacgcgatcgacgtgaaacaagacgcagtgtaccttcggatcccgagcccgaattaagaggattgagaggtcttcggcgaaacggtaggcgacggattccactggatggagaggttgaggaagagatcagtattcggaaatcggacatcccatcacgccagtcgccgcttcaagtccacacacctcgtatgaaactacgatctcggagaggcgggcgaatgtcagaggaagaaataatcctcacacgcagtgacagtgaagactctctcgctccggaagactcaatatctccaactagcgggccatctcttggtttcaacgatccgtgggagcgggaaacaatttcacttcatcgtcgacctgtgccgctagaagacgatagcgatatagctcacagccacgaaataagggctccttccatgcgtgagatggaaaaagacatagtgattgagagcacgcgcgtagtagacgaaggccctacaaacacggatggctggtctgtggtgcatgcttcatctcaagacgaagccattatgagcggagctctggacgttgttgaagtcaaaccccgacatgtgccactggaagaagtggaaacgggccggattgcgcagcaggtcacgggcgcggatgaatcgccaaacgatcggtggaccgaaatagcgaagagattggtagtgagggaagctattgagcagctcggattcgagtatgaagagaccagaacgtgctactacatcttctcgtacctcaagccggtatgtatcatccgaacagacgactttcttggattctgacttttggccacaggaggacatagatgagcttgttgaattgaccgacgagattcgaagtgctcgtcgtagacggatccatgacatccagcgggagcgctctgtgcctgatatcaggcctcgccttagacctcgtgtggggatgcctccgagggcatggttgattgagaagcgcatgcgagatattcgagatcgagaatggatgaattcccggtaattgatctaggaatatgatgtttacggcctatgatttatgatgaatttgtgcattaaaattggaaggtgccattgacgtcctgtatgtatcgcgagatatcctcaattcaagaacgatgtcgtccacatgtcccttttagtatgaatagaacgcgcgggctatgtataaaagatataataatcgctcgagatcaagaaacgtcttcttctctcgttcacacccagaggtataccctatatgtaagaccaatatcgccgacatgtatgatgttccttcctgagcataaacagaatgagcaggccacacctgaagaatattaatcgtttgcgatcaaaacaaagcttcccccctccttcacactccctccttcacataccctctctctttcacgcgttccctcttcacacgcagtgagatatcctaacttcaagaacggtgtcgtccatatgttacttctgaatgtgaataaaacgcgtgggatatacctgaaggatatcaatcgcttgagttcaacacaaagctttctatctcgtttagaaaccgagcacacgcgtgcaaatcggattcccacctcaccgtctttgatgcaggattgcctccacgtgggtcaacatgtcaaacgcgtccaccactgaattagatcgttcagttactgttgtccgcgttaatgatgagcgtttcaatatccagtctccccagcgaaagatcctccttcgccaactcaacagagctcttttcgaacaacaagtcccctcgccattctgggccgttctccaggtgtgcgatatcgagaagcttgagtacatcgtacagctcgccaacttgtcaatgaaactcatgcataccatctctgatctcatttgtgctctcccattcaaatggacggcaactccatctgtcgcccaacagctcgaatcagcatactcaaccccgacttcgggttcgagtttcagttcacggccacgtgcttccccggttgcaatctatgccgcccgagagcgagatggatacaagtgtgtcatcacaggaacccgcaagctctaccaaaccaccccgatcttcccagctagtgcagccagctcccgcttgcaggatgacccggattctcctagcctttggaagtttgcagatgtgttctggggaaagagtacaactgaaaggtggaaacgagccgtcttcagtgacccaactcagcccgacaatcctgtcaatgattgctccaatctgatctgccttcgcagagaccttcggtctgcatggtcgagtgggttgttcgctctgcgtcccgtctgggtctcggaggatatgactgaaatggaaatcgagttctattggcaaccaaagccagaccacaagctttacgacgtggtggatgtgtccaaggagcctatatctagcaagaacgtcaacagcgtggatcgactgatcgtggcggtaggaaagcgaggtgaaccaacatatcgtgccattgagtccggctaccgatttagaatgacaacggacgaccccgtccttcgcccgcttccgagtttcgacttgttggatatgcagtggcatttcacccgactgacctccttatccgccgtggctagtttcttcgatgctgatgatgatgaagacagcgtcagatcagaggacagcgttagatcagacacgacgactacacagccggagcaccgcggccgaccggagtatcaccctctgcatgccaaccctcccagcgcccacatactggcctgggttaaatcttcactttcatctggttccccgcccgagtcagagcaacgcaaccgactggagggtgatcctctgcgttcgtctccaagctcccacattctggcttgggtcaaatcttctctttcacctcccgagccagagtttgtcgaggatatcgatgaattcatgatggatgaagcgatgattggccctctgccagggtccgacactaacggcttgcgcagtgttagccagacctcgaaggattccgggtcggcggagtcagcgggttcggcggattcaggagattcggaagccagtgtgatgattgatgtgatttccggaactggccatctatctcttgacttcagccgcgacagttaagatgggagcgggcccaacataattcatgtacaacagcagactagttgaattcatattcttattcaatgcggatgtatcttgagactgtagtatgaatgtgttgattgaatctggggtcctataactcagttgacttgacggacatacaatgttgtactcattgtatattgtatggtcggaaacctgcagcaggaagtgatcaccgctgtcctccgtaggcttgtttcagatgctggacgccacctgcaagccaccaggcacaatagcaataattattgacttagccctgagcctcgccacatgttgaagtcgagaccttgcccaaagaccacctgggaaggccaggcctacggagcagagagagactggtcgagtaaccctaactacgcggcacccgaaagccgggagattacgtcggactgggttagctcccccttcccgcgcattgtggcggattgtctcagccatattatgccacaacatcatcacttcaggatttgccttggcagggaatattcgtaagtacggagatgcgtattaatattcgtccaatgatgctcggtattattcgcgactattgattctgtatgggtcgttcggggaacacacgacgtgtcctactgtttcaactgaaccactgcagttgtatttgtgtaactgaagattgaactattacatccttcggtttgttatagtatttagttatgcacctgctggaatttagatcgatcggaaagttgtagctagcacatggtatcatttttttatctttacgccgagtggagactctccacttgggagatgagtgggatgattcatattggacgagtcgataaaggagagataacctttgaaaaaggggaaaatcatggatgacacgtagaccgtcgtccgtagagtgtacggtgtacaatgctgtcctactgtgttaggatgttatacaaatccaaatatccttggtgctccgttctagaccggaggatgaatgcacaagccagtctaatcacgttctagaaagaaaacccgcccggaaaacgcacttaatagccggtaaatccacgtatatcctagcgctgtttcatccaagccgagttcgcttggatccggcaaatcacagcgatctctctagtcgatcgtcgtttgtggcggctgggcatggaaggcgagagcgaacattcggatcatatacgattcctgataactagaatagaatatagaatcctgtgctccgtattacctcgggcctagacaccccgtaccaaggatttgcaagttgacaggtggctactccgtatttgatcgtgatatactccgtcggaggacgggagtaccttggaaggccctcggtactgaagactcggtccgggtcccactagactaggaactccgtacaagttaagttacaatgtggctaagctgaagagatggagtggaggaaatgcagtgctattgccacaagcttggattaatatcggcggttccctagctttatttataaataatacacccaggccagaaatccagagttggaacattcttgttcggcgaagttttcctctccacttctattacgtatgtccactctaacgctgcaaaccgggtcatgatgcactgacgatctcttggacaagtgtttcggatatgagatatgaagaagggcagacgggacataaatagaagcacactgcctgtgcgtaggagggtagacggagtgatatagatagaaaaaggaaaaaagaaaggtatgcagggtggaatgtttccttggtatagcgatcggtggtctaccagtcaggccatggcagtggagaagaatcggattaggaaaaaaggcaataaaatacttgattgtatgttgttgtggtatactgtggttacttgtacggagtgtgatatacgtagattatcgaacggggttttacaggctatgtttataggcggtttatcggctgtttatataggcgtaggcacaacataactagttaacacaacccgatcgctaaagatgatccagatgatctgtcaacacaaatgacatcgatctcatttaataattcaaatcccagaaaatagaaatcaggatccaccggatacgtcgggactcgacatactccgatgaggataaatgtaggatagcaggatagtacctggagagcccgtgactgtggagatcccccttctcctcttctctctttctctctctcccctgtcgacttcgtcttttcctccattcattttgtttctttcttttcttgtgattttgttatgcagtcgaaatgtgttgacaccctacaacttttgcagcgttaaagtgggggacaaataagacgacatttcatattagattcttcaaccctctaggtgatcgacaattcacttcggtcggcccacacacactcaacttcgatcttccctcgacgcctgggacctcactgtcgcttaccctctcacccctcgggcgcgggacaataaacagatatcaacggaccttccggtttgatgggaaattctcgatcgagcacacccaccatgaaggtcgcggtagtggtctcggtttttgctcttctggctcggccattcgtatcggcctcatccgacctggcctactgtgctacagagaacacggggtcttctttcacgggaggttagtgatcgcaaccgttctatatagatttagccacatcgctgactcggcacacagtttctaacacatttcaatcgaatggattatgtgaaactacctgcaccgattacgcttttgctatcctccaagggagtaaatgctggtgctcgaacgtggctcccgccaagtcctcactagccgacgacacttcggactgtgatggtgcatgcccgggttatcccgcagacagttgtggaagcacatccaaaggagtgtacgcctacgtggaagtggtcggcaacgatgcgactagcacagccgctggtacaacaacttcgaaaaccacctcgtcaacctcaacctcgaccaaatcaacatcaacctctacctcaacgacctcggtaagccaatcctctttgttttgacactgttttctcttttgggcatatcttgggcacactgggcatatcttgtttcctgtttttgtaccgataaacctcctgccagcctagctagcctgattgggtgtttgactctctcttcgcttgtgggtctaatatcggggatagagtactagcgacccgcctgtaacggtcactgtgactgcctccgattccactaccacttccactaccacttcgacctcacccattgtatctacagcacaaccggtttgaccagtggcacgtttagctaactttttctcctagtcaacttcctcggatgataaaacaacaacttccttgccgacggtctcagtgcagaccaactctggcggccaagtcaagaccatcaccgtttctggtgcaagtgcaacttctggcgctgattccgcatcgcctagcaccaccactagcagcaagtcgaaattgagtggaggttccatcgcaggcgttgtgattggcgtcctcggaggactcgctctggttggtgctctcatcttcttgattttcttctaccgcaaacgcgctcgttccgtcagccctatcccaagccaagacatggcagacgacagaagcaggggatcgagtttcatgggaggtttcttcccgcgaagcgataacggatctctgccctcacgtacgggcacaacatttaccgatcggcgaatgaagaccaacacggtcctctacccgaacggtcatcgggacagcagtgtttcactgcaagacaacgaagactactcgcgtcctgttcttcgggtaagttgaacataacacttagtcccggcggaacattcttgctaatatcattctagcttaccaaccccgactaaatttggaatgaccattttcctcgaccactttctttcgcttccatcgtccgcgcctctcactctccattaatctccagccactccaaaacagcctcattatgatacccacttgtcgctcaatttctttctctatcttcccttctattcttatgggtgcagctgtggagaatacacggaacagcaacatgtgactccgggcggcctctactccgccaaggaacagttatgagggtgcattgacattcctccaaacacactagaaggacacggaaaaataagagcccaagtcctgaattcaaatctatggttaatcccccggccactcgagacgcccttcacgagccatcacatacattatcctgcatacatacccgccacatcggcgacgatgccagcccatgccgacatgttctgaaagtatacatacatcaccgtctttcggttgcgtctgacatcgccagcctctgggctcgtcgctctcttggcttcttatcttttctcttatttgttcccaatatgcttattagctttgcttgttttctcttcatttgtcatgtaacacccagcctcttttgtcgctgcccccgtcttaattgttcgtgcatttgctatggcttcgatctgaggggatacgtccccggcgctgtgcttagactgaccgattcaatgaaactactatatgcttgggataggatttggtgattacgttctgggattgtatgtttattgcggagcggagcgaagcaattatagaatacttgtatcaaagttatacataaagccgtacctaaacttgagaagggtaagaaatatgtatagaaagacaaacaataaggctgcataagcggacgaccaaagtttcttgtgcctatatacttcaaacgtgaaggtaaatgactaccggttggcatacttcgtcgccgtaaaggcataaatgccagatcattcattccagggggcaattgtgatgcaaatatacgatctaagggacagaagaggtaatcaagcaatgtgcaatgtgtaaaatatatggatgatgacctaaatagctactgccatgaaactctctgagtagcttcacgcagacaaagtcacaaaagacctcctcctctggaaaccaggagaatcatcttctgcaagatgaatccaatcctgccctgccaagggaagcttcagtctttctcacagagcaacttcacgacctccaagcttccatccgaacggcgcacataagcgtctcagtatattgcgcacactacggcgaatgagcatacggacaatgtcaacttcccaagctgagattgccaccagaatctcacggcctcctatatacttccctggggcaagttcggcgttactgttccgcatcaagcgcgcaagttcaaaatgacgattttgaaaaccagtgagcagagtagcatctatcgatttatctagggacttgggatcggcatctgcctcgataaattccctggcaatatccggagctgtctgcttccgtgcagcatgcagcggagtctcaccccttatcgagatctttgttatagtctcatttgtaaggtgaggagccaccttcgggaagaactgacaatcattgcgcccggccagagcatgtgccaccgtatccctgttcgaggccgcttgattcaaatccaagcctgcgttcatacaaacctgcatgacttgccagctagcccaacgagctgtatataataagcgaagccagcaaccttggcgccgccggaaaaggcacgaagcagcgccaaatcggtccagcacataaagtcgtcatagggtgcgttgcggtacttgaagtgcacataggaagggtcagcaccgtattccaggagtaaagttaccatcctaggttggttggcagcaaccgccacatgcagcatgaatccaccagtaaggctgtaaatgttagggtcgacgcccgaacgcatgtatttcgtcacgatgtcaatatccccgcgcttaatggcacgcgcgaagatctcgcttcagtgcggcccctttgagaatcggaagtcgtaaccccagagtgaccatattggcatgtcgattccggcaattgcatttggagaattccattcccagtcttgtccctcgtattcttgcctaaggggtaggacttgcgcagtcagtcgtcttttctccgtgacactatccgcgaggagcgagtgtaaatgcttgcaggtttggtgaagcatacagcggtcccggataagcgccgcatttgcaatcgccagaactaactcctcgggcaaattgcctagcctgaaggtgcctaggggcaggctggggcttgtaggtttagacatggtgcaatttggcggtggacttggtgacaagggttcttgtcgaattttgaatgtagacgtcaagccttctgcgaggatgttgatgtaacttttatgcaagaaaaacggttaatcatgagagctgtataaataattccaaagtgttggctccatgctgagcaggcttaatggactttaagagatgccacagagacctaacacaatctgtatttcattagctagggtttctctttgttctttctgtcgtgatatcaatgatatcaatgaatagatgcatcttttggctctgtcatctatagcttgtttcacaaaggagaaaaatgagagagaaagggaaccatgagttttcttgtgttcgctggcaaggaagatcaaacaaggtatgggcaacctgaggcatggatggtctcaacaaaaggccagacatccaaaacaacaataggtcctactgaggacaattccgacggaaacaaaggaccgagcgtgtcgtccttcaactagatacttgccacttgtagatactttggatcaataacatccgcatatcatgccgtattctaacccctgaaacgaaacttgatcgtataaccgataaaatatatgcttttctccgtggtggcagttgtcaccgtggcacgaatagatgcatcatatgccgagtgttccgcgaagcgctagtaccaaagtactgctcgtaaaatattcaaaacacagtcaagctcaatcaaatgaatcaggattgccttgcacaggtatctatctagactgctgctgccttgttgatgcgcaccttccctaacttgactctgcgagccaaatacaagaaatatatagttctcggaacaataccggcaatattggtgaagcgctttctattattattgaggcgcaaatatgactgataattaagcttttcacataaatggacggagatttaatctcaatgcagctatatgcacctatttagatagaataatatctgccgccgcttttatagccctggctcagtgagtgcgccgggaccatttaggcatagatctcagcgcgaacctcaatggaactgcacctacccgcagttccagctccgagatgcagttcagattcaaatcttagatcctgaggttcttcaaaatagaacaaacaaaagaaatctgcttatccttgtgatttacatgaatcatgtagaccctggcagtgcttcgtatttctttttatttcagaaggatcggcagtaaggcaactagagtagcttggaggaaatgcgtggagaaggcaaaagaaaaagacccatggattgagcttggctgctagctaagcgagagaaaggaagaccaatccagggagggagcaaaagtcctagttatccacccccaggcaaaaagctgactcaacaacctgctcatagcataaaggcctagaactgagacctaagctaaccttgaaatgagatcggtgatgcatttggtcccaaaggcggcttgccgtgaggagtaaataatataacctagcgagtcataaatatcttcacccactagacaacgcatggcgcttgataatcatgatttattaccgcaataggatgcatgtgacattggaaggattttattgtgggataggacgtatatagagtttaagaagagtgaggaaagtacgacactgattgagcgcctacaccgagtactttctgtgaaaataaaggggcgcacgcctcgtacaaatcatctcagtggatatataagggcaagaggcgtgggagagaattaatcgtaatttccacaaatgggaggaagcaagtaacaagataagtgatgacttttgcccacgttccatgtgtttctgcttagacgttgccaataatagataaataatagcgtgaaagacaaggatcccaattccggctttctggctactcaacccctaaacagaaattggcagtactagaggcagacttggcgagtggagatatccattgtcgttgtgaaagccgagatttagggttaaaagtacggtaccatggaaggaagcgggacatcccgcgcgtgtcaaacggacggattgtggggccccggcatgtccccggcactgggatcgaatggcattcggaggaccgttacgaagttatgaagtgtcacaaccacactagcgagtcattgcccagcccaggccctagaatgtactttttgacttgaatagcaacggctccccctatacggagcacaccgacactgagctttctttgggactgaatttagtttcatgtccgcggatcatcaccagtccgagcaccttggatagatcaaaaacaaaatctgtcatacaaaggagtcttcgtcattaaatagctgaaatatacatatggagtggtccacccggattgccaggatatacatcttcaggtcgcagggctgtgtcattctttcgtgatttccccccacacgcaagaccgcaaaaatgcctagcatcactgctacaggtgactttggcccagcaccggccggggtagatctggcgaaaaatcagacaggcaacttgttgggagcggttattcctgtagcggtgttcgggaccatcgcagttatattgcgattagttgcgccaatgaagaacaaagaggccagaaaattagctctcgatgactacctaatcgttgcagctcttatattctcttggggcacagcgatatcctgctttataagtgagtcaagatgagttaaatggatggcacatcacttacaccagattccctaggcattccatatggtaacggttaccatttacaatccttgaacaaagcggagtttattactgtttggaaggtaaggaaaataccgaacgaggtgcttgggatagactctaaccaaacattcagatactttttgcctatgtgatgatttacgccacagctatcaccttcaccaaatcctcgatcgtcttcttctacggccgcatcttcaactttcgctggtcactaggcttctgcatgttcttggtgcttggatattgggtcaccattatcgtcacagttgcagtggcatgtcgaccactgccatatttctggctggcctatactgatccaacagccgttggtgtatgcattgatgtgcccaaattcttcttcggcaatggaattgctgctatgttgattgatgtgattatactgtgtatgccaatgccaacaatttacaagttgcagatgcaatcgtcgcagaagctagcagtcgtgggaatcttgctcctagggagtttgtacgttcttctcctctcctactatatcattgatccgggctaatcaacctcagtgtttgcgtcgcaagtatttgccggatcatctcgcttcagaacaacacccacggaacagacgctacgtggactatggcaccggtctttatctggtcgtccgtggagcctttcgttggtatcatctgcgcgtgcctccctacctttgggccattctttcgtcggtggtggtccaaggctcggacagggcgctcatcaaacagccgcaacaccccaagtggcgagaatgcatctgcatctccttccacgacctggctccggaaaccccgagccaaaaagccacccatggactcactattcagcatcaatgaatttagctgtgtagatgaagttgaattaatgaacgatatcagtggcccccgatcgctgagggacgaggctgtgagtgatcatcatgatgtggagcgaggagacccttgtgctatcacagtccatcaggaggtggatgtgacatgggataagtataaaacacgcaaataatgctgatctgccttcaatggggagtccctgggctttgtgtattgcagtttgagacgcatcacattcgagaaatgtacgatatgaaataaaacgtgccattggcacatataccgtcctggcaagcggaattgagataataaaagaaaccttaacttctcgcacaaaacaaatgggaagcataactatgcagaaatacacgtgcactaatactccgagcgttgtaacaggtacgttgggggtcggttcattgttctccaaggacccttcaacgcaggaccgtttttagcgtgaacccaaatttgcgcttcatttcgaaacttggcgtgataggcggcgccatgtgccaattgaaaggggtaagaattatggaaattatggagagagttactactccgtactttgtactccgcacgtccgactagtttccccgtgctggtgtggagataagctgtctagtgggtttgccaatagccaacgacttcttctcaattgacgctatataccttcagaaacctactccgtgtacaaaagtacagagtaacagcctagaccaaatgtgttccccaaagccaaaactgagggggaaaaaagaaatcaccccatatgccccctaacttctcatttcctctaatctataaagcgggagctatcgtagcattgtaatagaaattcacaaacagtttagtcttcaaacccctcaatatgcctgaccttactgcaaatgggttaacacctgctacccgcgtggctaacggcgagacccctcccaattgggtcccttgcgccgagcaacctgcctttgcgcgacggaaactaaagataatctgtatcggcgcgggttactcgggtttgacacttgcccacaagatcgatcatgagctgaagctcggcgatgtcgtggatttcaagatctacgagaagaatccccaggtcggcggaacctggttcgagaatacctatcctggtgttgcttggtgagtagtctatacttccaataaacatactttattttctaacatatctagtgatgtcccggctcgtaagactcctcggtggctctttggaaaccaaaattgacattcatttagatgcatacacattcttattcgaacctaacccaacctggtcccaattctatgcacctggtcccgagattgaggaatacattcaacgaacaacgaagaaatggaacctggacaaagacgttcagtttaacactcgtgttactgagaccgtgtgggacgaggagttgggaaaatggaaagtggtggtagaccaaaatggtacaatcacgcatgacgaggctgatattctggtcaatgcgtccggtttcttgaagtgagaatcagttatcctcgacatttctactcttattaacggcgagtttcctgctagcaaaaccaactggcccaatattgagggcctgtcgagtttcaagggcaagttgattcacacttcgacttggtaagtaaatgttatctatgaacccaaacaaatattaacaaccggtatagggataacacctacgactgggaaaacaagcgcgtcgcagtcattggtaatggctcttccggaatccaatgcgtggctgcaatgcagccgaaggttgccagacttgtcaactttgtgcgcagtccgacctgggtctctgtcaacttttgcgcggagatgacagcaagtggaggcaatttcaccttcacagaagaggagaaaaagaagttcgaggaagatcccgaggctcatttcaagtaccgaagagggttggagaacaggtaagttcaaagtccactccccgacagaggtcagaactaagtcaattccgagtaaagtgtcaatgcgttcttctttggtatgtataaaggccacccgatgcaattgggcttgacacaggcttctgcggatcaaatggcggagcgaatgaagggaatctccgacccagaagttgtgtcaaagatgctttctcatgatttccgtcctggctgccgtcgcttgtcgccaggagatgggtatctggaggctttccacaaggacaatgcgactctcacctttgatccgatcgaaagtatcacagaacatggtatcaagacatcgaaaggtgacgagcaagaatttgatgtgatcgtctgtgccacagggttcgacacgtcctttattccatcttggaagctggttggccgcaatggagccagattggaagagcgatggaaagtcaaccccgaggccttctttgcggtccaagtggagtcaatgccgaactactttatcttcaacgggccgaattgccctatctcccatggctcgcttttgaccgaggtctcttggacatgtgattacattcttcgctgggcgaaaaggattgctgaacatgatatcaagtgagttattgtggtcttcgtaggtccagtcgtatgactaacatatctcgcacaggtcaattgatgtcaaaaaggaagccatggaagactacaacgtttggtgccaggagttcctcaagcgtacggtctggtcggatgagtgtcggagctggtacaaaaacggaaagagcaaaggccaagtcactggagtatacccaggcacgattttgcacttcaaagactgcctcgaaaacatcggcggggagcacttcaatgttgactaccgctctaagaaccggttccgatgcttaggtaacggcgaaagtgtgcgtgatctgaatggagcaggtgatttggcgtggtacatggacgatttgaaagtcaccacaccaccactccaagtcaacggcaccaacggcaccaatggcaccaatggcacaaacggcacagtttgacctatgtcaagatactttttactatttaccgttgctatactctgtatttcactcaataaattgtatattctttttctcgaaagcggaaacccacagcacttacctcatttccttcaatttccgatctggtagtatgtgtctaccacatcatccttcgagtcgccttgagatacactctttccagccacactccgaatacgtgtacctgtagggggcgctggtgctggcggcaacatatcgagcactacgtcgaattgatcaggcacacaggactgacgttcagtcacaaaccgcaaaagtccccatacagcatgtcgagacattctagttacttgcgggacaatatggaatgggcgaggctccgggcggaccgtaaatgtttgcgcagggccactctcagggtggtggatgactacagccttcctgactgggggcattggaatgggtataccgaacctataaggcccatcgatctcctgaactctagcctggatttcatcccaggtcttccgatagtgagtttcgaaggtactcgtccactcctcgtcagagcgatagccggcgagaccagcgcacaaagaccataagaaatagttagtgttggtccatgtggaaatacaaaccgcccatgacctggaaggaagattgtgcttctgacgaacgtcacagcggattactggttgctcggtggcttgcacgacggcaatgggtacaccgtggatcgggtgaacagcctgccagttgtagttagctgacatgattcctgaatttgttctttctaggaggggaaagggttagacttgtaagttgtacttgaccactggaataaagggatcgcaagccctagagccagattactggaatagtgaagctggcggagcacttgatgcctatctaatttagagcaacgggggctttatatagcttttggagagtgggtttttattctatggtaaagaacaaagaaaaggacctttgtcttccatcaaagaggagacctgagacatccaaaaaaagcacgttgtcaacggatatttgtctccttattagaagatgcgagtaacaaggattctttgtctgatagtctctttgttctttttcgggtagactgatatttttctctagaatcaccacaatgtgccagtggcttggggcaacaatcgaagaaggtatttagataacaaagcatgcgcggtaaagagcatgattggtcaatgcgggtcaatgcaagaccgccccaaggttgatctgcagattatcgccaagccttggactgtcaacggcgcatggtatggccatgtttcgctgtggcttccaaggcttctcaatagtgatgcatctgtagtggttgcattatttttttttcatttatgaaagaatagtgcttgtaataagaggaaaatcaaagggaagctatcttctcatggaaacaaagaaggtggaatgggaaagaaaaggaaaaaaaagagataaaggcaagaacaaccggagttgaaccggaacagtccaggtagtggaagatcttaggcacttccctcgtggtacatgtaatgttaccactaggccacctgctgttgggtcttgagtagtacattgatgttccttttctcttgcaatttttgaagctttgcttatgcatatacattatctctaggtaagtcacctatgtgcatgtctaaatgaatagtataggtcacatgtagttctcgacattttgattgaattccgaagactgcgattatcaggatatagctaagtctagttcaatgagattgaatttgaggatttagtctattgttatataatgtcacgattgagatgtttactatgtagagaagacttggaagcaacgttgggagtaaggtaggccgggacgatgcacttgttgtatggttgacggcggaccgagcgccaaggcggttaaccttaaaataaagtggagacatggtctgtgcacgggcgcatgccaagattttcactgtcaaagaatcttgacgccaaagtcaagacctaatacataatgacacctaaaatcgtaagatcagctgatggcctactggtcggctaagtcccgagacggcagtccctggacctgggttttttctagtactgtgtcctggaactgggtgctaatgttgctatccgtaggctcggtaaattcaaaagacctcctcgatcttgcttgatctgccacgtgttacgatccaacgttttccttccttcgccttttttcttgtttgctagtttgcattagctagattgtttgctacatagtttagcgagatgattcgaagtttgcattgtttacaaagcggtcaggacacagctataagaactagctgtctcccactttgcaacttgcttccttcctctctctctatcttagttattgtgttcaatgcactctttgttgaaaagacctggcacgtcacaccgcgcgttcaattgaaatcgtgtaatcctgactttgcaaggcatcatcacggcccagagatttatggaaatcggcctggaggaatgaacgaaaaattggggtgtgtgaaattggggtcctgcaccctgctcataacctgtttcttgaccgcttggatacggcctggcacagagagacgggttagggggtactctcccccgcgcccttcggcctcgagagccaagtagcctggggcatatagctcaacatcacttgtccactgctgtcggtcacagaggaacattgagtttggaagttggttagcgtccttggcttgacagagaatatcgacgatcggtaggtagtttattgggctggtaggtcaaaggatactcacggcggattttggtgtctataagcaccccgagcatgcttgatatccccaaaacctgaccaattcacgaaggcgctcaagtatggcattcgcatattgaacgggcggacttcaacagattctttcacagtcccgttgatttcaaactcgacaattgtcaggcccggttctcagacctagttcatcaaccaacatatacgggcctaaataaccgagatagagtactttgccagtatgtgtaagataaatagaccgaagtctgcggtctcaagatccgcccagggcagataatcctctattgatggatcgttagtagttgctggattaaggatagcctccgatggcatataattatcgagtagacagtgcccagtctcgatatcatagttatacaacaggatcgcgaatttcacccatcgcgctcgatttgcaggatgggtctcatcaacaggggcaagagaaatcaggccgttaatatcgattggctgaagagtatcgtagagacgttctaatgcttcggctgggtatcgaagaccttaaatgggttcatttatattcgatcttggcccctctgtacctggaagacccataggtgcacgcgattggtacgcctgaataagggcaaaaaaaaaaaatttgttagttcaatggacttcggagatttggaccgagtggaattcacatcacgaaattcctgtgtagccgaagcccatttttccaccagttgccggcggtggtataactcatatctctcatcataggaggaacctgcgtttgctacagaaacccaattctcctggatgcatgttagcgcataacttaaagacgtggttgtttgaaaattcgaatgctctaagaacatacctgtacaaatagtaaccagcccttgacttcctctttgatctagtccagagataaatctgtttctgggtgtggttggatggaagtggggattccccctagccagtgctgaacggatctcggcatcatgtgtgtgatcaagttaggggtccaaaggtccaaggaacaaatgaatcaattaaatcaacgctggagggaacagaagagaactttggccatgtactagtgaaagcttcactagcggggcgcctaactaggttgggacgaagccgaactgaacatcgtagcgaacatcgtagcggatgttggaatgaacgactactttacattccttataactatcctagaatcatggaactattcaaccaaagaaacaatgccatggagcaatcacgtatcaaccgcctagaatccctgctgccgatgccacttttcctgccaacccttgaaccatggactatcatccaaagtagagacctcccaatctttcggaactaatccattctccttctgctcgtctgcccattccttcagcctaggaattacaacatgctgcacatgccaaacgcccttgtaatccatgaggttcttctttccctccctaagaagcttcaacaccaaacccggtacgccaggctcatcgcggaattccgtgactagagtaaaaagccctttgaaattgaaaaccaccgcaccggacaagggtagacgcctgagggtttgccagtctacccgcaggtgacactcgtcaatggccaagtcagcccgctgggattgccgattcatttcgtgagggtgcccgggtggcacgtacaatggctgtccaatttctatgccccaagagcctcgctgaattggtttctcagtcggcatcttggtgaaaaatctaaaccaagctcttttgttagcacttcgatgatattcaatcttctctaggaataagaccgacataccgatccattgagaactgcatcttctccttatagtccggaatcggctcgtggatttcatgcaactgcttcccaacctttgtcgcgacattccaccccatcgccgagcagatcaccgccgcgcgcaggaaatagaatcccgtcgtgtcgtcacgaagcataattgcgaagtcttctggtacgttgtccagaagaacttcgagaggcggcttggctgtgacatcctgctcggtaccgagaatccagttttgcagcacgcgtttgtccaccagtgtgaagtactgcgggtatcgggcgcagatgaactgcaagaccatctccatcagctccttgcatgcaagttcggagcctggcatggaatcaaggacttcctttccattcttagcgtacagttccttgcgctgggcgatgcggctcttgtacgtgttttcgagctcgatccaccagtctgtttctagtttggtcaaggctgtttttgaacggagcacgagattagtttcaaatcatgattgttccgctttctacgagacatacacatggtttggtgatacgcccatcggaatggacgatatggccgaggcagggctttgtcgatgttgaattcgggatatgggcttgggagtggaactccactgagagtcgcatagtctggaaagtcccctagttgcttgacttcggccacggaaaatcccatcggtgtgtacttgtcgctcgggctggtcatatagtcggcgctcatgggtagaatgttccgacgcacttcttcttcgtgcacgtcgcgtctgggtgtagcatcgcaattaagatctgcaagtgtgtgtctgcgttggggtgggagaacattgtcatagctagatggggaagttgggcttgttgcagctttcttttccggagagaaagaccgcggtggagtttgagaagttgaatgttttcgaccacgcagtttaactctagccaggagagatctgccaaatgtccgattaatgacagcgtaggctccagtggcagctagaaggatgaatccaactcgccagagattctccagagtccacaggaagttcataacggctcaatccatacaagttagggcaaactgcagatggatggggattctgattcagtatataaaacttataccagcacagttgcaaaggggaggctttgcgaatgtattgagctatggacggacagggtccacagagtataaatactctccgggtcaactgtgggcaaaacatattcggatcttgtcgcacttggatgagggatgtccgatgcggggatgacattcgtatccagccagagtgacaagagatacgcgttggatagctgctttagtcctctggctcgattggatttgccgtgttaggagaggaaacgctggcggtcgatgccatgtcgacgtcacaggcggtttattgaaagtggtgttatgcttatcatgttacattttccagatgtccttatcatatattctacctcgtacgtaagatatgtaggtgcatacggtgcatgtagatcagttacgcaggtttgtcgaatttacacactagagaggtgcaaaatggcattgttcggaggtgatagtctagctgtcaactcactccctacgctgctcaatacagatagaaccccagaggcgatgtcttggatgaattggttctgcaaacaaacaagaaaagataagaagggaacaagtatactgaaggggaagcccttgtattgcccaaaagggtaaaaatgtcccgaggcttggcggcagatgactgtctgattatgggggaagcacctgtggacagcgcacagcactggccacttagacaaaactcactataacccgacgtgttagtcttgtctttctggcaacctctaccccttctctggagttatattttttgtacactgaaagtcatattggactcagtcttctggttcacagggactgattcgctcatccagcaaatccaagtcctccagttgtgatcgcggcggcagcttccagagactggtaccacagacacggtctttcgtgagaagatcgtcgatgaactgatccatatatgtaagcgtgaaagtgtcgcgcacccgtcgcttcagtttccgataatcgagaagtagtggttccagggttttgtagacatcgaccgggtcgaaggtcagtcgcacgtagaaagctgcaagagcgcgcagatatttgaagtcgcctcgctctttgacaagagcatcatctggatcttctgcctcgtcgccactaccggggtcggtgtagttgagtagttcgaggatgacctctcggtcaggcccgagctggaggagcttgaatgcaaggcaaaggaagggtgtcggtttctcagagacaccgtatgttccaccaatggaggtcaattcgactgcgcgatcacacagagtcgctgcgttcaaaccgaagcactgttccttccagtagtatgagtcggtgatgcggtcgcgcacagctttctcgaagagcgtggcggggttgacgccacggaccagggggcccttgtagccgcggttatcgaggaacgagctggcatcggcacgatgggctgccattgtggaggtgagagcggatgcggaagtgccaaggcatcaaagagaaatgaaaagggccacggctgtttttttgcgaccatcgcgataatgcggatttggaggataccgccttcatcaccgccttcatcaccgcgacagatcccgccaaaggtcttgtcatcgtaacattgctctatcattggtttcatttgaatcgctagcaggaatcatgtccatccatcatgatctagatgggcctccggatgatcactgtctggctaaaaataaacatcttggtcaaccaacaatgttgttgtactgacaccgccaagaccacgcttatcgatagtcgcgtggacaacgtaaacaacctgatgtcatgaaacaagctaacaagcccaacaataaccttggaaaacatgcttggggattgatagtccagggttgttatatttgaacatcatcccgggggccatgcatgtctgaaattctaattttgccttatcacattctcattattcatcccatgcagcctcccttgtggccatggttcttttaacatcctccacagtttcggccattgtgtcgatgggagtgatctgcatatttactgcattgttatttttctctggatatgtcctacagcagcaatctgtcaagagcatccagcatgctttgaagccccaggaagctgcccaaaaggccaggtacaggacgggccccgcattccagaagccactaaaacgaggtctatcagatacggggtatggggccgatgaagatataccaatcattgggagtcaacccaactacgactcgtctggaaactatgcctatctccaaatgctatccgaaccagatccatcagacatctgctctgcaatcctcttcttcaaacaactctctacaaaaggaacagccatccaggaccgcctcttcatgtacccagagcaatgggaccggatgtcagccaagacactgggcccatccgccactaaagtattatcaatattacgcgccgccagcgccaaatacaatatctggctcctcccaatcgacatgtcagcagctacagctgcaggctactcaacaacaaacagcaagctgctccacctgggccagatccagttcatgcagtatgacagcgtgctctatgttcaaacaccgggtctgttattagacaccggcaagttggatgacatgctcctggctcggcccctgcctctccgccacgacaagaaccgcccagagtcctataacaatgaggcgtggattcctatgccgcttcgtgcaaaccgcgaggcagatctcccgcctgtctatctcattactgtcaataacatcgagaacgggaatgttgaggcaaggactcatgttcccaatcttgcgttgcctggttttggtagtcttgtggttgggcctcggggagctgcaaaagcgttgaaatcagcagatgctgatcagcctggttatgtctatttcgatagcgatcgtgatggacatgttaagtgggctaacaatccctactttggcacttggcgagctcagcaagctgaagtttgtgagggattggacttggacgaagtccttcatgatgagcgatgatctttcggtttttatatgacatggacttgtacatgttgtaaatataaaaggaactggcgttggtgttgtatatatttacatgacaattgtctcaagtgcaggatttgggtttggggcttttgggtacaaattttactgtctattttggttcaatatatcaatctcgcgccttcggatttcaagtcatgatattcgttcattatgtgtcactatgattcattaaatgtatgcttctgcatttccatcttacacagcttttcctattgcggcacaccgatctcgtaaccaaggaggacttcagtggtgtttccttcccagccccggttaccgctggtagagatcatgtaacggcatgcattatcgatatacagctgggagatagttccagtccgatgaccaggaatgatcaggaacggaactggcgaatggcgagaagactggtcgccttgctcgttttggagatcgtagagacggaggatatcgtgagaggcactgtagataagggaggttagaaaagaagttctgcattgtctcatggtcctttactcaccagacaagatgacgcccattcggcatggccttgagtgctgtcaccggcccactcccctgtgggaatttgaacgttcgttcggcagttctcaaacccttgtggagactgtattcctcaacagtgccattccggcgtccggcatagatgtagtttccgtcgggggaccaacaagcattcatacaccatggaggagaattatagggggtgatgcgagcgacaggatcaggctgtcgccggtcccaaactcggattgttccatcgattgaagcagccaggaacgtgttatcacttgtcacaccgtgctcttgttgggtattttgtgagaagtctggggctggtgggggtgtctcgagatcctctgctttagggagtccattgacaagaggttgcactgcgccagtcgggatgtccgcatcgtccatttccatttccgttttctggactggctcatccgtgtgagtatttgtttggttcgacaatgtattctgcgtgtcttgtacatatcccatgtctagttgagcagatatttcatcatcaacttctcctggcgcgtcgacatcctgcatagcaccgttggctacagctttgccaaactcgtcgtcctcatctaccccaaatactcccccggatggctcaccaccatcagcggctccgccatccgcatcaccaaataacgagtccgctccgccaaatagtgagtctgccggggatcccgcctgcgggttctcaaccgggcccgagtctccattgtcgtgagaggtatccatgaaattgaaattgtctgtaccaggcgcatcatagtttgatgaatatgtgccattggtctgttgcgcttcgattgtgtcctgggggactggaagggtggactctggccgaatctgcaaagcagatatttgtccaccgctaccaccgaaagcccgtcgaggttgaccagtattcagatcccaatcaaaaactcgtttatcccagcccccggagagcaatgattcttcatctgatgtgagattcagggaggacactgcagaagtatgttgccgcagaagcgcaatttccttgccctcttcgtggcgcagagtttgcagacggattaccccagattctaacccggaaagcatccataatccttcgctatggcaggccaaagagtacaccggtgacaactgggcgccatccatgttctcccagtatgtcatcaggactccagctttgaccacactatccacgaagggatgcctttgcgccacggttaacatgagcttgctgtttattgagtccgcccagttgaactttcgcacgaatccatccgatccaccggtgaagacccaacgcatatccgctgtcgctgtaacggtattgatcgaggtcgcatgcggtgcggcggtggttgggatcacatcgtaggttcgggctgtgaggcattcagggcgcacacttgggtggtaaatggagaacggttccaacacggagctgtcgccattgctatttgtgttttgttgaatggcagggccttccgacgcctggctcgcgttcgaagggctatcgggatcctgatccccgtccccgtcttggtcattttcattatcgccttcgccatcgtcgacgtcgcgcattgtgtcgtccatatcgttctcattctcgttatcagagcttccgtcctgggagcctagggaaccgcgagggtgattagcaaggttgagatcgatcggctagcggaccattgggacaaagaattgtcataccgcccatgtcacggtcctcttcttcctccattgaagccatgattaccgcgcctctcgtggcagtccgagttgtggggtagctatcgtttgcgcgcagcaattcaaacagggtggaagtttcggacaaacagctccgacacaaaggcaaatgagactaaggctaatggcggtgagattgagattatgccctagctccagagtacaagaacagagagagggagcgttgtgaagtccgcggcttaaaatggaccaaccttccgcggtgggaatgggtccgatgcttgacggaccaatgagcgtcaagagctactatatacaatctatcacatcaatttacattctatcctgcacaatagactgtatataattaacaaacttgctactatgttatatatacatatgtagtatatatgtaggatgttttttgtgatatagaacattcataatattgaggtttgactatataatgtaatcttatatgttagctgcacatcgggaatgcatttcttatacaacactactaggtagtaggcagtgggtatacaatatatcagatatagcaagcattgtctaaactttggtttgcctctctcttaaaaaatatactcccttttagtcgccttcaatcgcttctcactcatgcctcacttagtttcatacacaatccatcgtatgtccacctaatgcgtccagatccgcgcggcctgatagataatattcggcgctggatttaaccccccacgcttgatgccacactctcttctactccttctcatcctacgcattctttagacaatcatgtcccactttcgctttcagtatggtcatagacccaaggaacaggtcagaccggttaatcctgagatccgccagtacttcgacccagatctaccagtctacggcccttggaagctttggcaaactaagcccgagcttccttcgaccgaagagatcctcgggacagacgtatcaggagatattgtcgctcttacccccaattgcatttcggagccttgggtctccaaggagaaatacctagaggcccattatgcattgatccgggaagactcagttgcaccacttcgaaatgccgtggctcgggttcgcgctgatccttttatgaaggatactcaggatatctccatctatgagaaggtgagtactgctctgtcgttggaatttcttggatttggatagtactgaccatctctttacatcaaaggtcttcattatcggtgttaccctagcccgagcgggtttggcgttgcacatccaattctcaactcgtcgtgcgggcaagaatattgcctggacatactctaaccgtcttaatcctggaacactcgtcgcccttacccccaagcgcaatgcattcttgagcaaatgtgttgtcgccgtcgtagcttgtcggctgctggaatcggttgagaaagaccccccagaggtcgatctcttcttggcctcacccgaggatatcgaggttgatccacagtgagcaatactatggttcagtggttttgaaagatataacaatactgactagtatatctcaggcaagaatggatcatggttgaggctcgagcgggatattttgaagcaaatcgacacaccttgacagcactgcagaagttgtcaaaggaaaggtcagcggcaaatcgtatctcccttattgaaatttacctgaccttatctagtttcccgttgaacgaacaaatctgcagcctggaggaagacattgatgcaccaggatacatcaacaccgcgccatccatggacttctcgccattgtccgaagtctctggactcgatgtcacgaacaaatacgacatcctcgagagatggccctcccagccaatgggaaagctagatgcatcccagtggtcagccctgaaccgaatgttgactaaaaagctggccatcatccagggtccccctggaacgggcaaaacctttacctccctcgctgctctgaggatgatgctctcgaacaaagggcccaaggatccaccgataatcatcgccgctcaaaccaaccatgctctagatcaacttatcaagcatatctcggtgttcgagaagaactatgtccggctgggtggaagaacttccgatcctgagattcgcaagcacactccttatgagatcagacagaaccagggtctattgacaattgaggggggcttgatggctccaatgagaaagaaacagaacaaactcgcggctgagcttgagaaggtcctaaagccacttgcgccatcaaacagcaacaagccccttgcagtatctctatttctggagcatggtcttttgagccaagagcaagttgattccttgaaggaagctgcacacaaatggcagcgatccaacactcctgcaaatgccgatcctttggcggcttggctttcagactgcgtgaaggagtttgactccgaatacgccggtgactttgggttcatcgatgatgatattgacctggagtatgagcaactcaaagagatcgaagtcgaacacggaagatatgaggatgactggtcgtctttcaaaacacgctattaccccttgtcgggtggtctttgcagctccaacaccgccaaagtctctcgggcaacagttgaaaatctgctaaaagagaaggacttttacaaaatccacaagaggtatcgcggtgctgtctatggctacctacgtgagcagctgatggttatcctgggagaaaatgtgcagcgcctcgctcaaacctacaaaaaatgcgcctccaattttcaaattggtaggtttgaacgggactactgtattctccaggaggcgaagatcattggaatgaccaccactggtctgagcaaatacagaggactggtctcgagtttgaaaccccgagtcatcttgatcgaagaggcagcagaagtacttgaggccccagttgcagtcgcttgtcttccgtcacttcagcatcttatccttgttggtgatcaccagcagcttaagggtcaatgtgcggactatgaactgtgcgggcaccctttctacctcgatgtctctatgtttgagcgtctgatgataaacaaaatgccatacgccatgcttcaagagcagagacgaatggtgccagaaatcagagagctcgtggcccccatctatgggaatcttcttcatgaccatccgtctgttggagatcacccttttgttcctggcatgggagacaagcgatcattctttttcgaccacactgcgcatgaaagcaacgacagtctgctatccaaggtgaatgactttgaggcatcaatggtggtcaatcttcttgcctacctggtgatgaacaaagtcccggcatccagtatcactgtcctgactttctacaatggccaacggaaattgatcatgcgaaagaaggcacagaatcccaacgtcgccaaaccatacgtcaatatagtgaccgtcgactcataccaaggagaagagaacgatatcgtcatcctctcgcttgttcgatccaatgatcatcgaggtatcggctttctcgcgcaggacaatagagtttgtgtcgccttgtcgcgcgccaaatacggtctttacatatttggcaatgcacgatgtgttagcaaacacagtgagttttggtatgcagttactaatgtgatgtcggagaaaaaagaagaccctcgtatcggcccggctctgcctctgtactgcacacgacacaaccaagaaaccctcatcgagagtgagtccctgtcctgcctagtgatatcaacggaagagatgatctaaccgtttttctagctctcaaggactggaacaccatcggtgacggctgcgacaagccttgtggcacgaatttaccatgcggacatccatgtccccgcaaatgccacgggtaagtttcgcgaataatgacagtttccatgcacccaatactgacatcttgactcattagttccgaacacgactgggtctcctgcaaacagcgctgccgtgaaattcgcgagtgctgtaacacgttctgcatttgtgtgtgctctccaccacacactcacgattgcttctgcggtatgggcaaggacaacaaaacccagatcttcgacggcggatccgactgggatgatgtcgatggcgaagaagatgatcgcgacgaaaaggtcggccccatcccccggacccgagccccaacccgtgcctccgcctctgcctctgtctctgcctccaccgcagaagatacagctcgttgcgccgagggtgtacgccaatggcaggcgtttgcgcgtggtggtggcgtgttggatgattatcgtcgggctgggcttgacgctagcgggaaacgtcctcagaaagatgctattccagttgaacagaacgtggttgctccggttcaaggcactcttatcgacttcgacgatgatgccgatgatgccgatgatggtcaggttgaagttctgggtgcaggggaagacgccctggctgagaggggcatcttcgcacgtgatagtgatggtcaggtcgaagctatgagtgaagtacaagacacgcctcctactctcgacaatgacttgataaacttcgaagaggatgatgatggctaccaagctgaaggtgtgagtcaaccgataatgcggcttccttcgatgcggcttccttctatgttagtcgaagtttcgcttacttccagggtcgaggaagtcgcggcgtctccatttgggggggatctgatcgagctttcctagatgggcggcaggcgtcactttgctatggtttttgcttttgctgggagggtagctcagtgaatgaactggggaatcaggaagataatgggaagaggatgatggaaacagaggaaatgatgattcgggatagcagaaaaatataaaagcacaaaaaaacacaaaaaaggcgacgatcaaagtcgcccacctcatgagttcatgaatacattattttccagagactccaatatatacaaacgccaaacccatagatatgtaatgtcaacatcaaatcatacttatatactcttccaagctctgcccaagaacattaataaacggccactgagtattcgttccaaacaacctagcccacagcttaagaacggccaatcccaaagaagccggttccagatctggcggcgcctcgaagtcatctgtatcaatagacgaatacgcttcttcgatgatacagcgggtccagcgtaggatacgactttcgttttctgcagcattgttagccggtaaatcatgcagcaggatatggacataccactcaacgactgatccggtcccgcctcggcaagggtaaacagccatttgcttagcaacactgcacattctatactggctagcgagtgccgcacgctccagaagaaggcttgactacgagcaatgtggtctatgcccagacgcacggggatgctgagagcatgagcggcgtatatgagtgccgggatgagacggtagctgcgttctgggcgtggggagtgacagagtgctgtggctattattatcgggtcgcgggtctcaaggcggcgatgaggtccgagatttagagataggcggacgtaagcgagtcctaggaatgcactggaggtgaatgggattggaccgttttcgttgtgtgggtctagactggattctggggcttgttgccatacagaggtccaagaacggagagctcgtctatgggttgaatcgttagaagtgagtctaggaaggtttatgggtagaagacttactctagtttattcagttcctctgttgggagagttgtggaatggtttccgttcggtaatgataactcgctcacgagatggattcgttgcaggagtccgtgtaagaggatatagttacccaatggagccgggatggggtctagtggtttggctgatcgggacttttgcaagaggagggtcaatgcgtcttggaagaacaactgctggggacctcgttcttgctgggctgcttcccattccgcggcggtgcttgcagtccattcaatggtagaacacggaagacgcaggtgtatctcattgctgcgcaaagatggataagcattgtatgcgacactgtgaacatggataaagcagaacgcaatcaactttgtgcgtcgcgccgattcttggtccgcccattcgtaccagtcgaggggtgcgcgtgggtcagagcgtgttgtgtcttctgtcaagccagcctcacggagatgtcgaaccagcaagccctgaaggtggaatgcttcttgtaccagtctggcattttcccacgtggagtagcccatcagaataaggagacagcgggtaatttcgatctgcttccaaccagcagtagtttccgctgttacctgcggttgcgtgagggattgatcgccaaaagtggaataaggagatatccccagcggtactcgagggcctgaattgtaccctggcttagctgggaaatggggctctctggccattcgttcaaatagaactgccttggaaacgtggaataatctttctgcgttgcggtgctcaaatctatactgggctccgatcgtcatgatagcaagaaccacctcaggggcacgttcattgatatagaaagtcgggatatggataaacggaagatgtgggtggaatccttcaaaataggaagtaagataccgagtcaatgtgtgacgagatggcagtgcgaaatccggaatcacatggcgaaattcttcgagagatgctgcaagacgaaaccgctgctcttcggtgacattgaatcgtgacggtggtctcttcgcgtttgggggcggttctagaatgttgtcagtgatctacagagtgatagcaatacaaggtgtcatataccagaatcagacagggttccaaggctttggtcgcccctgggcacagatggaagccaggatctgaatggtgagtcgcctcgagaaccatctccacttcgtcgtggccgctcatgctcttgggtctgtcgacccgtttctcttacgtcttccaggttaacctcttgtgtttgagaggtttcaccttcactgggaacccattccccaggcaagccaatcgaatccaagaaatgtgtgaattcctggaaatgatttagatcttcgggcaagtagggcatcggttgtcctattttgtgtcagattaatagatttcttataatggcagtcaagcgaaagaccaggatattgcatattgcatattgcacagaacattaggagggatacttgaacgacaaagaaaacaacgtacctgtaggtcggtaatcgcctggaagaagcagctgggcagcttgaagcatatccggatcatgcaccatacccgtatggggatcaatggctgggtttgggactcctgcagtagcagcgggaagcatgccggcctgatgcgggtctaaataaggcgtattctgtgccccagcccattggtgcacagccgatgaccctgcaagggattcgacgggtacgggccgagttggtgtatcatattgcggcgggatagctgcagggtgatgcgttggctggaaatccgccttggtttgctcgggcggcgtcggcgaagtcagcccatcttgatgtgagatgcgcgtatgacgctttaacagatcccttctagtaaaggccgccccacagaagcaaataaacggcttctccttggtgtctattttaccgggttagcattagctgtggggatttccccgggttttgcttacgggtgcgaatgtgtcgctccaaatgttcagtccgccggaaactccgaccgcagtgtatacatatacgtgcccttgctccacgggcacccctgtgcggctggggtgatggagacattgaagggggtatggagaactggtttggagaagaaaaggccctggttgagcaagtggatgtcgagatgggagattcgaccccaactcctccaactcggggcccgccgggacgttcggcccgcgataagcgataagggaagatttggagatgctcggcagaagtatagaggcatggagttgttaatgtcatattcagatgtttatcgctgttttatcctattggaatggtctaataactcctgaatacgtttcctggggttgtggtaggtggtcacgtcacatagtggctcgttacttcatcatcctacttactccgtacatactgtcattcttcaaatgtcctactataaagtactctaacaaaccagtacatgtctactttgtagtgtatggatttcacgttggatacaacatctaccctaaatctaccgaacgtcctcgaggaagctcaataggaaatccacaataccatcctgattcccatattctagtgcgatcaatcgttagaggaaaagacgttcatatagaaatatagaatttggtgttaaaagttaaataacaaagctgtcaaatcctcaaaatacaatctcactggacttctaattgcacatctcggcattgtggagttcacaagagcagcgataacggaaccttggaatgtcgtaaatcgagaaacggaactcatcgcgtaaatgagcaagtcagcagtggaattgtctgtcagttggagaatgccgggatgaggggcttatcttccccgccttcttttggtccggtttaaaagtcaacctcccctggcaatttccctcccaattttgaacaatcattcaataatggcaccaaagcgagttctcattacctacggtgtagatgttgatgctgtagccggttggctaggctcgtatggtggcgaggattccacaaacgacatcagccggggtaggtttcaatgttcttttctacattctgctcgctaacaatcaattaggatactgggcagggacagttggaacccaacgattgttgaaactgttcaagaaatacgatatcaagtcaacatggttcatccccggccactccctcgagaccttcccggaggacatggccgcagtccgggacgcgggccacgagatcggcctgcacgggtattcccacgagaacccgacggacatgtctctagagcagcagcgtgacgtgctggacaaaacataccggatgttgaccgagttcgctggaaagcctcctcgaggaagcgtggcaccctggtacgagtcttgaatttagatttagcaatggtgctaatcagatacaataggtgggaaactagcaaagaaggagcccagctcctccttgactacggcatcgagtacgaccacagcatgagccacgaggactgccaggcttactacctccgaaccggcgacacctggactaagatcgattacaagcagaaagctgaaacgtggatgaagcctcttgagcatggatccgaaacagggcttgttgagatcccgtccaactggtatattgacgatctaccgccgatgatgttcatcaaggacgcgcccaacagtcatggttatgtcaacccgcgggacattgaggatatctggcgcgaccattttgactacttctaccgcgagtacgatgagtttattttcccaattactatccacccggatgtgtcgggaagacctcacgtgctgctgatgcatgaaaggtatgatgtgatcataaatttgtgcagagtagggctgacattcgataggcttattgagcatttcaaaaagcacgagggtgttgaattcgtgacaatggaacaggtttgcgacgacttcaagaataagaacgctcctccgcctggggccttgatgcccgctaaggctggtgcgatgttggagaagtgaacatatcatctgaggtattaacagtatattatcacagcctcttagttggactacaaaatctatcaatgagaatagcatttgctcgtgtcaatagtttatcccgaggtccgttgtggtcaaccatcaaatgacattaccccaaatcaatatacggagctatcagcgctaagataactagagctatcggatagttaaactgattcgaagatctatggatggatctccacgtctctattatcagaaatgtctaccccaacatagataactgtatcctatgtaccccaactatatataccccaaatcaagtgctgtgcaaccacccaatcatactctatcgcggacaaggcaggtcattgataggccgattgatacaaatatcacaggtgtatgtctacggcgatctatatgattgtcgcggcgtcgagtataatcggcgtgtcgataacgtccaatgctccgttgctgcattttgtctgggctgtcaagttctaccgatcgggaagatggccattaatacggatgcaaaatcgcgcaagttctcatatatcgggcggctcacgtagcttggactagaaatggttatgcataagtcgaaagaccacccgaaggctagatatcttaacgtagcatgagcttggtaaccgccccctatccttcagcctagagataagcacctctagatagatcgtgtcggcggtgaaaccataaactgatcgcgtacggcatcatgcttcgagacctgatcatcggtaaacagcgtgtgtgcagcctatctgcagggtattgccagtggttagctgccgtgcacaacgggatcttggcttggcgtatgtcttggcgcaggtgggaagcttgtactattgcgccactagcgcttagccttgacaagaatgtaaatccgtgctccgtctatcgtaggtcattggaggaataatgaggaagttcatgacctccgctgtcgggtcggcaaaatttgcagagttatcaacgaggggaagttccacgggtgcgttagaccatgatctattggctggcattacagcgctatacacggctggacggatagacccttaaaatgagaaagataagggcctagaatgatgctaaagcagactaaaccggactaaaaagtaccataaagtgtgcgaggacctccgtttccgtttccgagtgtgaatccacgtgctcctctttgttcttgttatctcttaactagttcccatttccttctcacttactcttcttcttcttctgtatacctcatatcctcttgtccagacgaaaaagcgcgttgatcttatcaaatttccaccgcgcgtctacgttatcaccgggtctatcagaagatggcccgcaaactggccctgctggtcatattaatgcacgcaatccaaatcctcgctcttcctactccctacgaaaactcgatcgcattcaaatccgttctgtctggcattacacaaaacaatcgccactacttcccagaaaccatccccgatcaagatgagctcatagtcatgctgaaggagacagccatgcgtgaagcaggcttcgtgctctcgtcaaacccggacccgcaatcaaaggagcataaaacggagacggagcttcacaaatcacttccgaatccgtatgcagcgatcggcacggatgcaacggcaaaaccacaaccgaatagctacccaaagccgagacaatccaagtccaagtccgagtcccgtgtgaaggagtctttcgtggtcgcattaggatcatacaattacccgatctactggccgccatttgggttcttcgttatcgcggctgcggttgtgtgtttctgtacgatactgcgggggatccgcgcgaagaagtgaagaatgcgacatgtgactgtcggattaatatttatgttgaaagactttcttttttctttattcgcttctctacggagagaagcgagggattgattctaccaaggctatgcggttacccgttcagccttgggagctctatcctttctccactcggtcggaggcttgtttgattacggtgggactccaggccccgttccattgaatcgaatcgaccctatccccgataagcgatttgaaatacgccgcgaccgatggggcaattctagcgctgagatcagagccggatgtatatcctggatgactcgggcaatactccgtgacgaatcgttcgaatgttcgtgatccgaccacctttcccgtcccaactcgcgacgagcatacgacgagcaatgcgaatgccagtcgaggagatatcgaagatggcatctggaacttgccgaagaagaagcagcttgggtgttgaagaagtggcaggcatgttcagattgagggtgggattttcatccctacatgcctcctgtgtcaaatgactacatatttgttctgaatacaaatactttgatgaatgctacactaaaaggaaaaactacaaacttacctagcacatggcccatagtagtaatggtataccacaagtaatattgcaagcattttcattctctaccagaaacataaattccgacatgtgccaccaagaatagacgtaaggttacaagaagaactcggaaatgatgtgatagcaggtacatgcgcgaagcagaaaagaggacaaaaaagacaagaaagcaaccgaagacgccacaccggtgcgagagtaagaagccagagcagaaccatgataacattggaacagatgataatgatgataaagcctcccggccaggaaatgatgattacatttgtgtctctctcgctctcttttttgcatccccgccccgaggaatgagcggggggtaaaccaataacaggtagtagatgaagtagggggtaacaatgaatatgtacgcgagagattctatagatagggaaaggaaagaagaagggagccggtgctttaacaatcaccgacaagacgcttctgcgtccaagcgcgttgggctccgtctagaagaacgtccatgttgccgctgttctcgcacatgccgcggaagacgccgtcttctttgttaatgagggtccaggggtggtcgtactcgacaacgcggccgtggtcaaggacaaggactttgtcgtagtcgatgatggtctgcagtcggtgtgcgattgtgatgattgtgctgttgctcaattcgcggagggtctcttggatcttggcgtcggtggcgtagtcgatggatgcggttgcttcatccatcatcaagacgcgggggttcttgagcaaggcgcgggcgaggcagaggagctggcgctggccttgggagaggttggagccggactccgagacttggctgtccaggttgtggaagacgtttttattatcgactactgtcactgcgctgctgttcacgccgctgccgttgatttccgtcgcggtgcgactgcttgaggttgtgggggttgcggtgcctgaggtgctggaaccgataaggtgcacgcgacggagagctgtgaaaatctgttcgtcactgaagagaccgaagggatcgaggttgctgcggagggttccggtgaacagggtcggatcctgggggacaatggtgattgactggcgcaggtcccgcagtccgattgacccgatgtcaacgccgtcaatgatgatctgacccttctcggcctcgagaccgcggaagagagccagcgcgagagaactcttgccagcaccggtgcgaccgacaatgccgaccttttcggcagcctttacagagaacgaaacgtccttgagaaccgggtccagatcgggtcggtaccgagtagtgtagttaatgaactcgaccgcaccttggctgggccaatcagacgcaggtcgtgagtcttcgatgacagaagctgcttcctggtccacattaaggtattctctgacacgctcgacagagttcatgttttgctggacctcggagtacagacgcacaagccaaaggacattctctgtgaatgtgacggcgtaggtcagggaaagaccggcagcaccagcatcgatcgttccaacgttcaataacacaaaggtagccgagaagaacgagactagagcaccggtccaatcaacacggagggcgagccagcggttgctagcccagaggtagatgtgtggccggttgtaggcattgatgcggcggtggttgtcgaccatgaagcgaggaccatcaccataagcacgaatggtgacgataccgttcagggtctcaccgaactgctggtacaagggactgcgctggacagattccagacgcttgaggtctcgcgaagagttcaaataaacagcaccgagggcagtgtacaccaaagtgatgaacacaccggcaatcaagaatcctggcgtgatccacgaaatcagaatgacaatcataatcacagatgccagactgtggagcatgccgatagcaacaggagcgacttcctgatcgacagactcaacatccttggagaaccggttcatcagttgaccaagaggcgtggagtcaaagaatctgaactttgcgtgcatgactgccctgagaaggcgatcatgaatcttccatgatgcatggagcgaaccccagaacagaacagcttcccgagacaaagagattgcgatatagaggaatcccaggagcgcatagacacccaggtaataagccacgttcacctccccatcagagttgccggaagagcttgcgccaaattggggcagaccccagctgctcatgcgcccaacacttccaatgctgaaggtagggggtttgagatgggccgcggcggcgtactttccgacgtcctcggcactatccttggacgtatggtaagaattcgcccactgtctgatccagatgttggtggaaacagaacccaattgctgcaagacgaatacaacaacagcaccaacccaatagtaccacgggcccatggcacggaggtacatggtgacagtcgaccacttgacactaccagtagccttagattcagtgagtttggccttgtcttctacctttccatttggagtgccgttcaaatcttcatcatccgattcatggttcgatggggcacgggagagtccacgagagctgggtcgggaattgggtcgagacttgaggaactcatcgcccaatgcaccagtagcggcgacatcgttgggacggccctgggcggaaattctgccgtgctcaagtaccacaacgtgatccgattgggggacagtcaaagcaacgttatgggttaccaaaatacatgtgcggttgaacatcagagggccggtaagagcttggcggaagatgtgcttggcggtatgagagtcgacagcagagagacagtcatctagcagcaagtggcggccactgctgtagatagcgcgggcaagagagattcgctgcttctggccaccagacaaactaatgcccttctcgccaacaagagtttgatcaccagcatcaaggatagcgaggtcacgttccagggcgcaggccttcagcaccgcacggtagcgacgttcatcatagggagaggcgaagatgatgttttcctttacagtgtcgttgaccaaccaggcttcctgggcacagtaagcaatgctgtcaaccagaccagtttcagggtccactgggagatctgccctgttgggcattccaccgggaagatgaacacgaccctcgagaagtttcatttctccaagcaaagccatgagcagggaggtctttccagatccagtcgggccaacaatgatgttaagcttgccgacaaggaattcaacgtcgacattgatcagacggaaagcctccaagtcggcatcagcctcggtatcttgggaatccccactggagctgttccaagatagcgttgccttttcaagaccaatcctggcaggtgttcctgtgacagtactatcacggagctgatcgtatttgcttgtttcctcctcgttcaagtacttgtccacacgatctagagaaaccttacattcctgaacgtgtgccaccatatccgcgagctggtccaagggtacccgcagcaaagagaacatggacaaggcagggaaagcgatcgaaggggtcagttgttttttctcgacaacagtatacaagaagaaggacatgaacgtgatgagaataggcgtgccgtaccagacggttgcggcggaggaccagaggatgtatcgcttgcgcagggctttcagttcggtcttgcgcttctcgccgacaatgtcttggaaccgctgctcccaagcaaagtacttgatgatgcggatgttttggaggacttcgttagtggcgtgaatacgggcatcggtgcccttcaaaatctgattctggaccttgttgaactggcgggcgataacaaggttgataggcagcatgagcgccatcaaagcgataccggcaaatgagctgaaacccatgatgtggtagagcagaataatcgccattgtaatctgcactggcacactagcccacaagaagtggagataggcaccgacctcgctcaccttgaacgaatcgatcgccatcaagttgataattgtgccaacattggcctgtgtaggttcctccgcaattgtctctggcttgttgccagcctcggcatcatttccattggcggcctgcttcttgcgaccaaaggaaaagagctttttcttcttattcttgattggatcttctacgggtttcttgacctccagtgaagcgcctgccttgcggcgaagagccttggcataaatttcaccaataatgatcgcacggattttcacgcccatcttacgaccaataaataaggcctgtccatctgcgacaccctgaaccgcggcgcaacagaagagcagaatggcgaacaaccaagccgcgctgggtgtggtcgaccgaggatcttcgacgtactcgaggatggccttgaggagtagactaggcatgaaaacgaatagattggcgaagactgtccaggcaccctgctttagaattgtccccataaagtaccggatgagcttccatgccaaagagcctttcatttgtctcttgcggaattctctaagcacgtgcgcagccttctgagacggggtcaggttccaaacatcctcaatctccaggggttggcgataacccttcatgaccaaaggatcgagccaggcaaatgtcgcaagagataacaaactggccatggggtatgttggaggctccaagccatcttcgcgttcaaccagaactggcttattgcctcggcgagtggtgagcgcaatgagcagcaacaccgtactcagagcgaactgaatgctgctgaaaatcagggcttgctgggacacggggtggataatggcggatcggaagaccatgatgttgaacaaccactggaagctgtacagaatcgctgtatgggtccagattctcggcgcagaggaaaggtccatggtcgataggaggaaacggaccagcaccaagaaaaggatgtaggcccacgacacaagcccagccacggcggggagggttccatgtcggccccagccgtgagtcgacaaaacggcgatatagaccccaacttgagcaattaaagctgcgatctcgagtagtacaacggtgatctctccacgcgggcgattgacctcgacaatctgagcttgttcttgttgtacagcttggaacaacatcgtatcggactcgttttcctgcgatgcactggggacctcatcttccgagtcattgttcgggagaaccttgtaagcgacacctttttgagtgaggatatatcgatgagcgaggcggattaggatcaccagcagcgaagtgccgcagactgtgaggggaagtatgacctgaagaacgctattaagatacctcatgatcagcataaaatttcaacgatcggaattgccatcggtgtagacacacttgcgctggaagcaacgagacaggtcgtcaatggcccagacggggccttgacattgcggtaacatgttgaccgggaagctcgcagaaactgaagctctcggacctcgcgcgactcgatcacacagcttttcagctggcgacagtgatgaatgggtaaaggcgaccggtattcggttattgtgaactacccctttagcaacaagacttgactgaaatgctggacaaggctagcattgcaaagtcgaggtgaacagtgacgctgggataagggttccgggaccgagtgccgttgaggcaaaagagtaggcggggaaggctactcagattctgccgagcaagaatcaccgaagatgttcacgagggtgttgagatatggatctaggggcgggggaagaatcagagagtgaaaatgccaaatgttccaaaaccggcggtggacggtgaacggactccggtaaagggtgacattagccaccaccaaggtttggtggtggagtgaggtaccttatacccaattaacagtattttctgcatacggagtttttatcacaatgccattattgacttaactccttcgggagcccgatgggcaataattcctgcaatgtctcaaagtattcatctgacctgtctcaatcagcttatcgtgctccactataaaaggtatcgattttatatggagttacaacgaactcactacaatatgtatagaagatgtccaagtattcaatcaaaatacgtacaattcagtatgtatcagtggtttatccactcttcctcctcataaacgcctcatggtaggggttcatcttaagccaagcgtctggattgaaaacgcgaccagaatcgagataacggagttttgttgaggctttgctacatgccagctattcttcttttgacaagggcgttgctcacctttaggtatacacaaataatgagcttcggcggcggctttgctactgtctacaccctccaggtaatagtcattctgactcattcaacagccgtgagatcttttgcattaagtgcgtatttagcatgaatgatgaaccattcgaaactaaataggtcagcaggttttatcttgaactgagaagcagaaccgttggtagaacagtaggggagctcgatgacgaatcaatcacatcactacttacctacccctagagacatgtctctttgaatcttgttatatgtatacaaagcgataaaaagcataaatcatacagtactttactaaacatgatcagagatatctgataggaaaaggcctctcgagaagagtcactcggttgccttggggtatcgctgcaaccatccctccctggtgaatcgctgcccgtgcgtagcgagaagagcttcaattttcgcttgcagttctttatgtcattgtaagtcagtacttgtacttgtattagtagaccatattattagtaccttcgactgtcatctccttccgggcttgtagagagtaatggtcgcgaaattcgtggacaagaatgaggtcgtcagggagatgggttcctgttcagctcagtcaatactgcgtagggggaaagtcttcgaatgacccaagagaaacagaccagccataatagcatatatgtaaatagtgagaccaccccaggctttgacagtgcgaacgaggttctgctgtgtcctagagttggggcgcatggaagccccattaggaactgagatagattagcgacgtgagctgatcgttttgactatcatgaattacattcataagtggctgggttgagagccttcggttgtacttttcctgcagttgtaagaagatcgaatacgccgtgtggtcgtcgtggacctggccaagctcggagccggatggaggtgcctgagttaacgcggaatatatccttgggaaaccgagtgaaggattgaatgaatctgttatgcgacatcttgatatatccttgcagggatcaggcgagggtgtatcgagggttgaggtaagatagcaaagttgcgaacttagcaaccccgggaaggtcacctgcaagggcaatcacatcactgctacggagtatacacgaattattctgtagttaaaaaagagatgagtattactatacaccccataaccccattttttactttctacacacctttctaaactacggagtacttcgatattcatttcctgagtctatttttagagattactacttaagagtgtggacaagaataactatataacatctaacaaagacagttaagcattaatttaggtatgagaatcaggaattcaagcattaagagttcgacttatgaatcgatataggaattaccacattgtatactccgtagacctgaggtggcgggcatagtggataaacgcccctcttagtcaggttgccactgaaatttcaggcatccgttgatctaatcagcatcggcctcgcctccccgtgatcccggcattgcctacggttttataattcattccgctttaacttcaatttgctccatttgcataaggcacatggtgctgcctcggcgtcgtatagctatataaggtagattgctcccttacaattacgagcggaatctctccaggtgcaactcttcagatcccgcttatctcgtcatggcggagcgcatcctcatgaacgaattcaagacccttctcaaagagaagtgggttaacgttcaggtcagtttaccacttcacaatcgcctttgacacttccacacttgcaggttattgacatactttgtgtagttgcacgatgacgacatcttcaactgggatgttgccctgatcgtgatcaacccggactcgatgtactacggcggctacttcaaagccgcaatgtcattcccctccaactatccgtatgccccaccaagtatgacacctcctctcctccttctcatcttcaaaataactgacgagattcttcttaccattagagttccgcttcctgcagcccatcaaccacccgaacatctacaccaatggcaaactatgcatatccatcctccacgcgcccggcgaagatgaaatgtccggcgagcttgcctcagagcgctggtctcccgctcagcgcgtcgagtcggtcctgatctccatcatctctctgcttgacgatgccgagacttcctcccccgcgaacgtcgacgctgccgtcttgctccgcaaagacccagaagcctaccgccagcttgtcaaggccgatgtcgagaagtctaagctcgatattcccgccggcttcgagatgccaacacatgatactcccgtccgtgagcccgtggagaaggaagacgatgacttctgggccgatagcgatgccgacagcgacgtgttcggtggcagtgactctgaggatgaactcgtcatggaacagtccagcggcagtgatatggaggaggacgaggatgagtcggccgacgatgattccacggagacaaagaaggtgtgatgataactttctgcgtctttcgtctggggaattgttgcatgatcagccatttcaggtctgcttctctgagcattttcagcattctcggcgtgcccttgtcatctttcatacgataggcgtttagcgggatcattttcgaacattatgggtcttatggtttatgataacatgcaataccctaatgttgcacagatattttaacgaatcaaatcaaattctaacatcaagatcgactctaaatctctatcacatctctatcacactttcaccctacctacgtccttacttcagttcagccaagccataaatcttctttgcccagcgaaagtggactctcctccgcctccccacagtgcccccacctataaacccaagcatttacggttccaatatatgacaactaacttatccaaatatcatatctaggtatatctacttacccactgaacccaaccaatcccaagatggcaacccaaaacctcgccacctggacagtctccctgtcctatcccgacctcccaggggaagtaatcgacgcggccgtccgaagcttctacaacatagccgggtgcatagtaggcggcagtcaacacatcgcaacaagcacagcccgcaaagccctatcccccttcgcaggcccaccaacctcccacctcccgggcacaagcacctccacagacgccatgcacgcagccctcttcaacggaatcgcctcgcacgtccacgactacgatgacacccacctggacacagtcatccacccaacggggccggtagcatgtgccctcctcgccatcctcccgacgctcccgcgccccgtttccggaccggagtttataaccgctctggtggccggtatcgaagccgagtgtaaggttggcctggccgtttggccggcgcactacgatgtcgggtggcatatcacgtcgacgactgggtcgattggtgcggcggtggcggtggcgaagttgcttgcgttgtcggcggaacaggtcgcgcatgcgattggtctggctgctacgcaggtcaccgggctccgggagatgtttgggtcacatgcgaagtcgttccatcccgggcgagcggcgcagaatgggttgcttgccgctttgcttgcgcgggaggggtttacgagttcggttcaggcgttggaggcgaagagggggtgggcgaatgttgtttgtgccggcgggaatcggattgaggaggaggttgcggcgctagggggtggggggcgctgggagactgtgaggaatgcgtttaagccgtttccttgtgggattgtggttcatcctgttattgacgggtgtgtttggttgcatggggagttggggcgggttggggttgatgcggcggatgttgaggaggttgttgcgagtgtgcatccgcttgttctggagttgacggggaagacggcgccgaaggatgggctggaggcgaagtttagtgtttatcatggtggcgccgtggggttgttattagggaaggctacgccggcgcagtatgaggatgatgttgtacttgatacgcgggttgtggcactgagggatcggttcagggcggtttctgatgagagtttgcgggctgatgagtgtcatctcgttgtgaaggtgaggggagggactaccatcgagaagcatgtcgactatgccgtgggtagcttggagcgccccatgaccaatgaacagctgacagcaaagttcattgagcagtgtgttggggttctaggagaagagcggactgacaaggcgagtcagtggtgttgggcgttgaaagaacaggccaacgtggctcaaatcaaagatgtgctgtagattgactatatgttggtacctgcatatacttactaagagtttaatgaacctagttatcttacagtgtcactgtgtaatgccggacaaatattggtttgataaatcaacacgtattctatatcagtccgaacttatggttgtagacaagtatgctacgtgaagcaacaaaatagcaaaatagcaaaaacaatctgtgtataggagcgtaatagcggtataaacccgcggattcgtgttggagaatccaaaaaaccgagataaaaccaaagaaaatatgttgtacgcctgtgttaatccattcatccatgcccaagttgttgggtttgtcgcagacagaaccctaacaacgttctaatctatgcagagacagcatccttgatctcgctgtagatagcgccaagctccttgtggaaagccttctcggcgttatcgatgatgctgccaatgcgctcctcaacactggtctcatcctggtgggccttgtagccacccttggcaagaatctgagtgaagttggcggagccaccaccgttccaggccagaagctaatatagagttagcctaatccatgcttttctagatatggtgggaaacttacgttgggggtgtcggagggaatgtcagtgagtgtgccctcggtggcgacgctgataagagcagccttgagctgcttaggggtcacatcggcgacggcaaaggcagagtccttggcgggtgccagggagacgtagtaggccagcagaccggcgatgtgaggggaggccatggaggtaccggaaatggtgttggtggcatgctcgctgccaacccaggtagagaggatgttcagaccgggagcgaagatgtcagtgcacttgccgtagttggagaagtaagcacgctcatcagccagagtggaggcgccaacagtgacggccttctcagcagcagcgggggagtagttgcaggcatcagcgttgtcgttaccggcagcaacggcaaagtgaataccagcgtcaacagcggcattgacagcgagatccagggtgcgagagctaccaccgccgagagacatgttggcaacactgcccttgaacttcttatcgcccttcttggacttcttgatgtgagcctcggccgcccattcaacacccttgacgacatcggacatagtacccgagccgttagagcgaagaaccttgacagcgtagacgttggccttcttggcgacaccgaacttcttgccggcgatagtaccagagcagtgagttccgtgaccgtttccatcctcatcggcatcaccctggggaatggtctggccccaggtagcacggccctcgaagtcaacgtgcttgatgttggtgccagtatcaataacgtaagcatcgacaccctcgccaccctcctcagcatacaagtacttgttgaagttgccgaaggagaggctctcacggtgagagatacgggcaagaccccagggggcgttcttctcaacagtaccctcggtcatggtacggacttcagagtccttctcgatgtaatcaacctgttttgagttatattagccgccgaactagggaacttccgcgagggaatgggattactcacatcaggatgacggcggatctgctcaatgacatcctcgtggaagtgaccagcatatcccatgagtgatccagcaacatggaaagtgtgcttcaggcccatgaaagcctccaagtcggcatcgaacacggagcgcttcttcagctccatccgaccggtatgagcggtgtgcacctcctgcaaccagctctggtgagcggacgcagtgctttggtcaacatgctccttgaacacaatgatgtaggaatccgggatatcctttgcagtcatggaggagaggataggagctgcctcattgtggatggagcctacttgcacgggcgaggcagctaccaacaacgggagcagtgtcaggctgaggaagcctttcatgatgggcaaagtgaaagattaaacacggcggaaggaacaggtgatggagaaacgatagttgtaggtggtaaaggatgagtgaaggataggttggatggagaggagaaggagaagatgaggagaagggcaggcttatctagggaggagacggaggatcgatgatgcaagcgggcattacatacgatacggttacgccggcggatgacctgtcgctgtcgatctagtggagaacatctgagaatggggtacccgatacggtatggtatggtcaccgtggtctcgggaacctcaggagcatccacttgacttgccatagcatctatatcagacttagcatcatatgaaggacgatttaagtgggttggatatcttccggccactataataagtaaatatacggtagctatagcaaggtagtgcagatggtcatcttccccccgggtacctggcagtatcatgctgctataggctataggcaacccccctcgcacggcccagtttctccaaggcaactcatcctccgaagtcgcgtgctttgtgttcggatgactcaaagggttgggcgaatcccccttgtcttgcatgaaagtgccattattggatacaacttggccaatctgcggagaagccatcacatcataggatcaccactcccaagcttctccacatagctcatagctgcgtcttatcgcgcttatcacgtcctatcggtgatcgcccgtaattttgaaaggttaccgtttttacaatacaataacagggctgtgtccagccccgtccagcccccgttccccaagggcaccgagtcacctgatatccaactctcccctcccccgatagcgaattacagcggtcgccgaatatctggcatggggttctgcggatgacgagtgcagcaaattttcctaaccgccaggcttcctattttggcacgagcactgtcacacaccaatgcagaccgttgtacccgatattgaacattcacggtctctgatggtcatacgccatcggagcggacgtggataagatttggctatggctccgtcggctcccctccaccctcccttcccttccgaatcaaccgatcgattggccgaagagctagccccaaccattgaacagctcaagagcgtcggtgcaggcaccgcgatcactctgcctcaggctctatcgacgaccgaatctcttctccgcctccgccacaccttcatagatgatgcacatccacgcaccgccaaagatgcattccgacacctccagggctttcaaacgctgctggcactggcggaccaggtagccgagctctacgatccggtacacaggtccaaggaggaacggaaaggcctgttggatatcttcaaagatgtcctcggggtattggcagagggcttgaaggaccattttggaaacaagcgatattttgctcggaagatagtagggggaggtattgctgctctggagcgaactctggctgtgctagtcaaaaagatagacacaactgagggtgacgcgcatcatctctacggcgccattttggccgcagctctatgccaggagacagtgtcgggtatttttgtaacactgagcaccaagtttccgcaggataaggactctccttccccagaagacgtccaggatgctgtggatcattgcattggatcagccgagacagtggaagtcccggaactacttggaccgttccttcgtgtgtggttgatgcactcctctttgtcggctggatatgacatcttacgcctggccttacccgcatgtctttgccaattggcttcgcagtctcggaggaatgtcgtagccttgcatgccactgatatgctcacctcaatcctaccccttttattcgatggtagacggtcagacaaggagaaagcgatttaccaacatcttactcaatctctcagcgtcctgggaatgagtatggacgatgctggcttcttataccgcggagcgcatggcaacccacaagttctaaaagtgctattgtctgctcttaaatcctctaaggagcccccatcaatacagttcgatatgtctcgtcatggatactgttcagtcgagttcgcaacacttggtcggccatttcctcctatcaattcctccggctacactcttgcagcctgggcccgttttgacgagttcgatcccaacacgcatactactatctttggagcgtttgatgcaagccaggcatgttttattcttgcctacctcgaaaaggatactcggaactttattcttcaaacttcgattcgaggttcccgtcctagtgttcggttcaagtctgcaaaattcgagccgaatcgctggtaccatatttgtgttgttcaaaaaagaccgaaaccaatgtcttcttcccgcgcatctcttttcatagacggcgagtttgttgaacaactgaagatcgaatacccttccgttcctgtaagtcatcagtcaagcaagccatcgcgcgtgcaggcattctttggcacccctcaagatctagcaatgcgactcggaaaaggcgtgtccacttcccgatggtctcttgccaatggaatgcttttcgacgaggcttatagcgatgacatggtagctgttttctacaacctcgggccccggtattatgggaatttccaggattgcttgggctccttccagacatacaaggcctccgcaactctcaacctgcggaatgaacatcttcacccaggtaaagaggaagcctcggacattgtcactgccatccgtagacgagcaagtacattgattcgcgaaagctcgattttgatcaatgtctcttctgtcgccgttcttgatgacgacgatagcaataatgtcgacgaatcacagttgataaaatgtctctcacggcaggcagcaaagagtctgcatcagctaacaaagtcgggtggcaatgccgttgctctcaacggcgccactccggctatcaatgacggcttaacacagcctcagggggtaggtatcctgactggtgatcctgtcgttgcggtacctagggcgatggatgacgctagttggtgtctaggtggctgcgctgcggcccatctaagcttgatcaaggcggccagcaccgcggacggcacccgcatggccgtggaagctctctatgaagcagtgcgggacaactggagaaacagcgaggctatggaaagagagaatggctatggtattcttgcagtcttattgcgggagaagcttggattctgcatgggcaattctccgaccgcgtttaaaatccccgtggttacctctgatacccaggagctgtcatccttaatgcttgacctgttacgtttgactctcggattcgttggctacgatttcgaaacccccaatcactccatcatcacgaacccgctcgcctaccgtgttctactcgtggacatggacgtctggcgactcggagaatctcaggtgatggggttgtattactctcaattctgcacgtttgccgccgatagtaattatcgcagattcaacgccaggcgccttagtcgtatgcgtaagtttgcttcctcatgacaccacagttcttacctcaagctgaccaaactaggtgtcaacaaaaagttactggaaactttgaaggaaggggagctgaccgaagagtctctccaatcttgcttatcggcattccgctcgttgatggagagcagtccctctcccgaccttcttcgatcactagctctgtccatcacatatgcactccataagccaaagaccccaacaaaccttcagagaaagaagagccttcggtacgcggctacatcgtctcgacctgcgtcggcaacaccagagaacaattatcttcccagcgtgactgtgggcattgcaatgctacgggtgtactctgccgtgctgtgtaacccacatgaccctacggcattgaggaaatttgccaaggccgtcacaaacaaggtatgtggatgatcagttgccttggagagagttttgtttaatcatctgtgcagtggcttctttacctcatgtgcgaggaagagcctgaggttgtgatacttgcaacaaagattctggcccgcttggtcgtggccattggcagtgcatacagcaagaaattcgcggagaagagtggtggatacatcattctagaacaccgtctgaagagatgctgggatgttcccgcgttgtggcccatttgcttttctatctttttcggggttgatcatgctttgctggatctcgacaaatccctcaacgtatccgagctgcttagagctttcttggccgaaggcgatgtaacggtcgtctttccggatatgctacccgttattatgaatatgttgaagagcggggtgcgcaatttgactatggcaagtgatgcgcaagaagatactcaacgctctctggaagagcgtgcctctaaatgcgatgaactaaaaatgaacactctcaagcttccaggtaggctctcgttgctcatgactaaggtctggggttactccaactaacgccgttctctactgttagatgctactccctcagaccggaatatccatgggtttgctctcatcaattcggtggttcaatttttagaagaagcacgcgctagatcaccaagcttccaggatttcactgcacaatcgacttacgtgcaggagctactttctgtggtctatcccgttgttgtcggtgctgataccgtcagccccagcgaagaactaaatttccgacagaccggactcagcttcgatgacagcaatctagtactacgaccgcgctctagtactcataatgcattgaccgctttacagacaaccatggttgactccttgggcagtccagatgaaagcactggttctttgaaacgtggatcatcctttattttggtctcgcctgataaaaccaagtaccagccctcttctgcacggatacggcggctgatgaacccaacctttgttggaactaaagctgccactgataatcccattgtcaaggcagtcttgaggcttgttctggccgtcttcgaggatcagcttttaggacgcaaagacttttcgggttttggtctctatctgaagaccccgcccggcttcctggaacaccaggcgtacttcaattcttgggttttttcctgtgtgctttcggcattgcaagaccttcctctggtccgacccggtctgcttcatgaaacccggacacttacgaacctcgggcgcttcgcgacacatttgacggaggcagtatacgaaggctggttcatcaacggcgcatcatccacacttgaatttattggtccaattttggagtatctccagcgcccggacgtatctcagttgaaaagcattcgtttatgtagccaggctaccgcaacgattcgctcgactctgtacagagttatcttatttcagttgtcagaggcagatgacactgaaaccgtgacattgctaagccgattgaactactggcaggtggtccttctttcggcggctgaaacccaatcaaaacatctacacctgctatgctacctgctgtacaccaaactaatcagcacaaatggtgatgttcgctcagccgccactcgcttatggagaatcatattggtgcaggcaccggatggaataacaacactcctcagctatggctctatctccctccagcgtcggttggctgacggcttcgacgctctttctggaatggacgacgaagctttcttgctatggatcgatgaccagcgcgacgatctggatgccttgttcttcggtgtattttctcgatcgtgggacaccttcattcaagaagagaatacaagcactgaggagtctgttaggtcccgggtatcgaagcgtaaagacaaactcagacaatgggctcagatcgaaaaattcgatgaagacatgacgcgaaagcacgaagctactttgccacattggatctcgaatatcacggcatccgagttcttaaagtctcaacgattcttgcaagatcttcaggatagctctaatttcatgtggtcagctttcgccgatttactgcttgacttgcgacgaccgggcggccttctcgcggtagacaaggaaaggagatggtggctagaccagaccgaaggtcgcagccgtatgcgactacgcctggttccaaatgagtctggtgaacgacaggactatcagcctaagcgtaaagcctccgagcctccagcaatcaaaatcgacacccgaatacgtgcactctcggagggtgagactctgacggcacctcatcctctcacaggggaacaggagaatccggaaggcgagtcgccgaacgacgataccgacaaccggagcctcatggaggataatttcgagatgattgacgatcctaaaatcgagctcgaagactatgaagatagaaaccggaaggtgatgcgatctcttcaacgtggtgatcaggttcaaagcgtgtgcaacctgtctcgaatcattggtctagaagcagtggaaggtatctcaattctcggcaaggactgcatctatatcctcgacaatttcttccagagagcagatggcgagattgtgaacgtctggcaagcccccaatgaggaacgagatccttatgtgcgcatgatttctggtcgcgaatcaaatgaccaccgctcgcaggagcatcacacaaggagctggaaatggtctgatttggtcagcgtttccaagcgtcgcttcctcttccgcgatgttgctcttgagatattcttcaccgatggcactagctacttgttgacattgctttcggcacgagctcgagacgatctgtgcaaccaactggctatcaaggcgccacaggtcacgggaagcaccggacactcgcgaccggaagacgtctggcgatttgaaactcttcgcagtcaagatgatgcaccacagaccctcgggtctaaatttgctagtgtcttcggtcaccttccggcaaacccagcaacacgaaaatgggtcaagggtgaaatttccaacttccattatctgatgttgatcaacacctttgctgggcgtacgttcaacgacttgactcaataccccgttttcccgtgggttttggcagattatacaagcgaagaacttgatcttaccaacccggccaccttccgagatttatccaagcctatgggttgccaaacactagaccgagaaatgggcttccgtgagcgatacaatgcgtttgctgaaatgggcgacgatgactctccgcctttccattatggaacacattactcttctgctatgattgtcagctcctacctcattcggctgcaaccatttgtcaagtcatatcttttactccagggcggctccttcgatcatgccgatcgcctgttctattcaattcgcaaggcatgggagtcagcatcgcgagggaacatgaccgacgttcgagaacttacccctgaattcttctatctcccggaattcctggtgaactccaatcattatgactttggtcttctccaaaacatgaccacggccattgactcggttgagctgccaccttgggcaaagggcgatcccaagatcttcatcgctaagcaccgggaggcacttgagagtccctatgtttccgagaacctccatcactggattgatcttgttttcggcagcaaacaaaagggtgaggcagctgtcgagtctgtcaacgtcttccaccacctctcatacaaaggtgctaaagacttggatgccattgatgacccaatggaacggttagccaccatcggcattattcacaacttcgggcaaactcctcaccaaatcttccaccgacctcacgcccagagggaagatcaacggcaccgtataccgcggctggacactcttgcagaatccctgacacagatgcctttgtctcttctcgatattgaagaacgagtaaccaccctatccatgaaacaagaccgtttgttgtgtaccgcgcccctgaggctcaacgtgccgccggcctatgactactacatggaatggggtttcttcgatggtagtgttcgtttctacgctgccgatactcgcaagctcctgggtcactttgagcaccttcatgttggtcaattgtctcatgctagctttgcggattcccgcaccttagtcacctgcggtacggactgtaccatctcattatggacggtcactacaacctccaaatctgttgatttgcagcccattgggtcgctatttggccatcgggcccccgtaactgttctcgccgtttcacgctccttcagtgctttgttgtctgcctccaatgatgggcaagttatgctatgggatctcaatcgacgatccttcgtccgagcccttcccggcgacggtgcggtcgatgtatgttttcttcttcctaccacctgctgtcctttactgacaaattagtgtgctcgaatcaacgatgtctctggagacattatggtttgtcgcggtaatcgcttgacattatatacccttaacggcatattgttggttgaccaaccagtctgcgagtcaggcgacgaccacgtcttgtcctgcgtcttctacgagggggtgcagaatgaatggctggaacgtgaattggtattaacaggccatacccatggtgtagtcaacatttggagcaagaccattcgcggtggccactttgagttggagctgatccgacagctgcatcataccgacagctgccgcgataatggtgccaatatcaacgccggcatcagttgtattttggctctcccccacgtggtctatacgggggatgaagccggccgagtggtgagttatatttttccggttcatgttcattaacgaagctaacatgatggtagtatgaatggaactgcattcagcgccgctgattttcttggttatcgtcttcccaggggattgggtctgttgtactttgcacaattttacacaatacacaattatttctcccattcattaacttcaaaccttcataattcgacatccgtactatcaatctaccaatttcctcggctagtatcttcagccattaaactagggaagggtgtcattcggacggaataataaatacaagggagagaaagaaaggagaaactatctataaagatctcgacaagccatgcaaatcatgaatgagaatgtctacggacacactcttttactaattttatctaagggtagaaagttactactttggagtcttttctatagaaaaactaactctagcccatgtaatatagtagatatattaaataccctctatactagtagaccggccggagtatcttagtcgaatcgacactagttgttttcctctttgcagatacaacgtagttcgatcgccattagaattataaaaaaaaaccccgacacttgctcagctgacggccgcccaacaacctagccacaattccattccagtctatggaccattcgagtgagccgttttcgactacatacagtactagtgggtttgtactttctactttccgataggtaacatgctgcgcagccctcctgggaggattacagtgcatatggagagctgtaccgagcctagatcgtcgttatgcagcttcagtccgcgtacgcccagtccctaccggtgacccgttaaactaatgagtagctgtttatcagttcagttagctacggcatctccagtggccctagcacccgccagcctttggagagggatttattaactgcatactacaaaaataacctttatcgtcagcacaccactttaatatcttcagcccaggaatcctcagccactaccagagtttaagcgccgtgctgtaggattcccttctgggaacgccacggcaaaggctcgtactatcggacccggccattccgttttgggtttatatgataatgctgacatcaagttccatcgctcttctggagctgaatctgatagtagcatttttggagagggcatatcctgtcgcttcgtactatcgggtatatactaaccatttacgccaccctcgcagcctcggggttctcctatccccgtatatgcgtcgacgccattatttcatttcagctccgagtgatctatttcctgcaggtgagattggcatatggctcggtcatatccgaacccacttctctttggttcatcgtgagattaatgtaggtgtaagcactagagcacagcgcccaaaccgctgaagcactaatgtcgattggattctcggtggcgatctgagtagcaaatagaattatacctcaataatagccgagagaaggtatctctattagccttcgtatcacggtcccgtttgttgtataaagcgtccatatcccacgagtattggagcttgtctcctccgcttgactcgacaagacactatttctctattagagcatttactctgcagcaagcagcactcatacacaatcccaggtccagatatactagtcacaccagcatcctgtatgtatgctaccacaagctcttcaggagcatgctgacccttgtagcgctacaatgtcctacactatccgtctccgtgtcgagaatagcacctcggacgctctcacagttgtcgaaaaaacctgctggtactatgccaatggatgtacctggaccgagaacgacggccagcatgtgctgttcatgggaggtagcggtacctctggaatgcttcgcttcaaatcctccttcggtgaaatatttactatcgtcgtgggcatccacaattacaaaccatggtgtggtttgctgtgggacctgggggaccaggatacggcactgaagctgcatccggaattctacagagggggcaagtattcgcacgcgacgcctgacgcgtgttacagccccgtgacgcatgttacaagggcttcgattacttttgagagggagaatcaaaacgaggtatttgctgttttgaaatactatccatcctaggtagtccaggacaggcgtgtttgctagtttgccgtgggatagggcggcagatatgtcaggtactgattggtcgactctgggtctagataggaagccttacttccgcactctattctcatctgtgtcactcatctgtgtcaagaatgtatcaagagtgaataagataaagaagatactttaaacggtccgttaagtctgaaaggactactagcacaatacactagactcctgacatttctagacctatcatcacccctgatgcggccgaaacggacactacagagataaatattatttgtgacttattatgaactgaagaagtgctattttggataccatgaagcagtccgactcgtctcgcttttttgctcatccagagtatcatcaatgctcacctgagtattgctcacatgagactcagaatagcactctccaagaacaacttcatacatgcgaatcagaggaatgtgagatcttacgactccccatggaagacttcgacaggatggtaattgagagcgcatccacacccactccacctgaaggtgcattcgtgtggccaaccgatatgacgaagccaatcactcccttctttgcacctaaatctacatacgttgctatatcccacgtgtggtcagatggcacgggtgtgggcttgcgagagcctggaagggtcaaggaatgcctctatcggggatttgcgatcgtcgcggcagggtatggctacaaaggattctggtgggatacaatctgcgtcccaagagatcgtagggcaaaagatgtcatgctcaagaatatgcatctgaactacaaatacgcagcatttacccttgttcatgagtatctgtgtcagttcccacggaggcaagatggcacccctgctatcggtcttgttctatcgccatggttcacacatggctggactgctttggagctagccatgtccaacaaggtttgagtgccttatcgactatctccagagaggcctctagaagaggtcattgtcgatcttgaggataacattatcacggaagacatcgcaactctcggccatcgagtagcaatcagacttattcggcgtctcaaattgcccggtcgttctctcttggatgttttgaaaatcatgagctgcaggacaacctcatgagcacaagaccgaattatgattatagctctcatggcacaagccatggaccttgaatacagtgactctatgatcgagatgaccaaaaatacattgcgttcatgcaatgaaatacccaagacattcattttccatggtcatactacactccactcgcgcggttccttcttatggtgcccatataacctgttcgacagaaacttggctgtgactttagcttgggataagagacataaggagatgttcatttggagaatacgaaacgttgaaatgatgacggaaggatggagcaagtctgataaaggttgattttggaaccggcatatcgaaaatgataactttattgtcttgaatgatggtacggcttttgggtattgggggtttcaattgatctcaattgagttacccttgaagctgaagccgtacagttcccatgtatctagggaattccaaattcgggctgcttagagccatccatcgaggctcatgcttcttcgtcaaactttttcagacctcgcaatacttgtgcaaccaatcaacacgagcatactgtcagaaagaggactcgaccacctattcgtcggtgaaatgtaaattggttgtcactaccttggctgcgtagctgtggatttcaatgagttcgaaagcactgataccgattattttaggatcggcttggatggaaaagagtgttcatccaggaggtggtggacgagtacaggaagtttagtagacttattgaagggcactttggtgagaagaagacacaagaagtccagacccttagggctagtgtaagaatcggaaccgaggatttagcacttgatacgcgccgagtacctctgagatgatattacctaggtcgttctgggtaatggacattacctataccagaagttgcccttttggggaattacatggcacttgactgtgactcccgcggcgtgagattctgtaaggatcgcatggtttctgattggactacagtgtagtggtgcgatgaaagagggagagagttgtcaattcctaaaggggcagaatgcccaactatctagttataggggttagtgcctgctgcactgggctgatggccaggtaaccactacatccaacaacatgatatgtgtttagactttagactccagtgtatggggcgaaacgcacgactagtactgaggggtcggtgtctgaggcattcgtccggtgatcacctgacccccatgtataacaatatgccattcaactcccgagccctccgaaagatctcacgatagattcccaggtagcacggtcttggtcaagctcatcgggcaacatgtctccgacatctccggcattgcgggggatatccggggggcgggcaccatcgaagattgctgctgtggcagagcttattccgcaacgcttataccttgattgccgaccttgccatagactcgtcgattcgaatctcctccctgttgatgagtagatcaatgcttgagcagacaacatgagggcttggcagaagaaaggcctgcaccagtaggtagtatggctttgagcactgtcatctccgcggctttctctattgctcctttctcttccctctcttcgctgctgcttctccatacttcttttcgattctcagggtggatacttcactggtgtagaacctttcgagtaaacgggtatcatgcccggaacttacttctggtagaaggatgccttgtcataccagtgaatcgggtagctcccaggagaggataaattctcgatctggtattcttcggcatacgcatggcgtaatttttgtagaaatggatacgatatagggagatcgcacaaacgtgttcgaagctcgatttctgtcacagagtttgaagtacgtgatacccacatccgaatatcatggtgtaaggctgcctctgcaaattttctcatattactcggtcgaatgttttccttttccatgcgatcaaccagaggattattgtaaagatctgcaaagacactcggacatttctttgccgcctgttgtatcatagctgtcgtcggcgcgtcttcggcagcaaatgctccttcgaggtaaatccccagagtccttcgggaagattcttcaaggagaagagttcgttcgatctcacgaccgttgcatcgtgtaactctatcctgaaatatgctagataaagacacaatcactccgttagtaggtattccatgacaggatttgaacatttacctatgctctaacattgaggtcttggaggtcatggggacgctctggaccgaagctttggtagggccacccggtagtggtgaagctgtgacgatctcgagcacaagcgagaacagtcatttgcataaaatcagggaacggaacttgcagctagtttttcttcctttcctctcccgtacttagtattctgacgaaaaatgcacttattcatctgagaatttggcatgtagcagaagccactaccgggggcgaccgcagcagcagcgtgatgctcagtggcatcagcagcctgattgatgcacacgttagaaataatattcagtcctgcctagtcgtgtagtcccgagagaagactgctccttgtagagtggaaacagcaggcaatttcttaccttcatggcattttgggccgcggcccggaggttcccaacctcttcatgggagagaggagaccccttcgccttggattcggtggcttattcagtatgttagtaatgctcagtcaactatagggcttattgatcgttctcttaccctgtgggccagccgcttcttctccttgactgagatagcaagagaaacaagaaacaagggcaaagtgggagagggcttgcttatatagctggccgattccatatgtcagtaatgctcagtcaactatagggcttattgatcgttctcttacccggtgagccagctacttcttctccttgactgagatagtaagagatagtaagagagagagaaagaagaagcaagtggaaagtaagagacggcctgcttatatagctggccgctctaatgacaaacaagacgaacagcaaacatcgcgatccgtacaatgggatcaatgactagatcatgatatagaccataaattttgaacagacatagtgagtagaagctctgttcttgcctaaccactctctctcgaaggacagtttgtagcttcttctctagggacaactgccaatagtcgatcggctaatacacggtcttcttctgtgtcctttatactacagacttgttgttgagggtgactcgctatcctatgagtattgggtgagcacaagttgcacttggctgggacgcataaccctactttgatcataaacacacaagtaaaactagtggccactggcggtcgagtatggactacagcaccgcaccaggactggaaggctattcgattgatccaatgacacggaagacatggaagacatggaagactgtagaaaaccctcttgaacaagacatactatactccgtaggcctagggaaaatgatacatacatgttactactccgtataggtacttccaattgaaagtttcaagcaacttccattcggaaatccgtagggtccatagttaagctgttcggaaatcatatttctccataactaccccgtagccgtcgacatgtatttaaccgggcccccggtgaacgttgcaaagaccgctacagtagtgggccgttgtccggtctaccatcctccggttgggggaagacggagcactctgcgccggatttgggattgtagtacacctattcaagccgttcaagcagaggaaatattgaaaacaaatcgaagagtattaatagaaatacggcagctattttagaacgaagaatcaagaatccaaggggaaatggcaaataaaacaagaaaagaagtcggatgttgtcgaggggagctgtctgatttcatcgtgcagcgtcatttgccccgcctgaaaatggggcagaggcaaggtacttgtgttgactatggcgtccccatactaagcgcaagtacccggcaattgatctgggactggtcaatgacaccacccctccttcttaaacaccgcgccgtccgccactcttcttctctcttcatactttcttcatttcactttcaaaacatcaaaaaatgtcttcttctcttgaacagctcaaggctactggcaccgttgtcgtttgcgactctggtaagctctcaatctgattatttgggttgtattgaaaacacgctaacactaaatatttaggtgacttcgccagtatgtattccagactttgcttgatgatatgggttccagcattggacagctagctaacttcaaccacagctattggcaagtacaagccccaggatgccaccaccaacccctctttgattctggctgcttccaagaagcccgagtatgccactctcatcgacactgccgttgcctatggcaagaagaacggaaagaccctcgatgagcaggttgaggccaccctcgaccgtctcctcgtgcaattcggaaaggagattcttcagatcattcccggcaaggtctccaccgaggtcgacgccaagctgtccttcgatacccaggcttccgtcaacaaggctcttgagatcatcaaggtacgtgcacgagtttatgcgaaatgacttccggcaattccgagctgacccttgctactcagctgtacgccgacaacggtatctccaaggaccgcgtcctgatcaagattgcctccacctacgagggcatcaaggccgctcacatcctccagtcccagcacggcatcaactgcaacctgaccctcatgttctctctggttcaggccattgccggtgccgaggccggtgcctacctcatctctcccttcgttggtcgcattcttgactggttcaaggctgcccacaagcgcgactacaccccccaggaggaccccggtgtcaagtccgtccaggacatctacaactactacaagaagttcggctacaagaccattgtcatgggtgcctctttccgtaacaccggcgagatcaccgagctggctggttgtgactacctgaccatctcccccaacctcctggagagcctgtacaactccaccgaagccgtgccccagaagctcaacgccgccgatgcctccaaccttgatatcaagaagcgcgagtacctcaacaacgaggctcagttccgcttcgacttcaacgaggaggccatggctgttgagaagctccgtgagggtatctccaagttcgctgctgatgcggttaccctcaaggagctccttgcccagaagattcaggcttagatcttcttttaattgtttaatttcttgtaaattggcgatctcccaaaaaattggaatcggtagatacgaattgatgaatttggcctcagtgctattttgatatataattctccggtgtcggtgtagcagatcagacttgaggggtaaagggaaccgcggaatctggccgggccggcttattcaggcccccgcactagtttagccttctactgctttccagctatggtgtcatttcacccggagcagagttatcctggcatcttatattacccgaggttgtgacaatgctattaggatgggttggagctgtagctgtgagacaagtgtacaatggtattgcagactgcataacacttctagcatgcagctattggggtatgtggcagcaattatttacacagcagtatgcacattattaataattatgtcataattattccccctcgttccgacttgctacccacttgggaaggtgggggatgttttgctgtggtattaagtaccgagtacacgtatacagagctctgtttatactgcgatacatgtacccagtacttgatccatacaagtgtagagtcacgtcgacatcattcgccttattatctccctccgcccacttcctctcctcttcttcacaatcctcattctcaatcttcaatcttcaatttaaaacattttaagataatcaaaatggtcaaggctggtaagtaatgtccattattggttctctctgggccatacataagctctcctcagtctccaagttccccacgatcggtggcaaggaccttgggtgtgagcagatttgagcaccttgtgatccagagcgcaaatccgggcctatcggcttgcgtcctcgctctagctctccactgctgtctgggtatctgccaatacctctgggacaatccggggatcatcgctgctcatttgctagaagcatggcatcctgatcctgggtgcggcacgagccgttgctgaggctgggaccagacaggggctctggagatctagtagccggcatgccggacagccttcgataagcattctggaacaattcattgacctctttcctttccgtgcagttgctgttctccgtggtgacgctaaggtcgccggcaccgtcaccttcgagcaggctagcgagagtgcccctaccaccatctcctggaacatcaccggccacgatgccaacgctgagcgtgctttccacgttcaccagttcggtgacaacaccaacggctgcacctccgctggcccccactgtatgtcattgatcagccaggtatgaggaggaaggatgggatgctgatcgcttctagtcaaccccttcggcaagaaccacggtgctcccactgacaccgaccgtcacgtcggtgaccttggcaacttcaagactgacgctgagggtaatgccaacggctccaagcaggacagcctcgtcaagctgattggtgccgagtccgttctgggcgtaagtttataattaatctagtattgtcgaggcagattgctaacattgtttagcgcactctcgtcgtccacgccggtaccgatgacctcggcaagggtggtaacgaggagtccaagaagactggtaacgccggtccccgccctgcttgcggtaagttcatgaaggcgtgctgaggtggagatgaatgctaataatctcttctaggtgtcattggtattgccgcataaatgcagctctattcccttttgaaccctggattttgatatccccgtaattggtggatggaaaatgcaggatactccgtctaggatacatgaatgaatgccaatttgacatgtgaatatttggatttggatatctgtcatgatcgatgaccactgtatagcttcgatgctttgtagacttccgtagaagctcggacggctgaccgctttccccacaagtctaaacaccggccacgtttcccctcaggccattctgtttgctctcaacttccttttctcttgtgttttcttttatacttttattctggttctgtcttcaatctcatcacaattgtgcatgtggtagtggagactgtttcattcagtatgcctttcgaagcccgggtcaagtctgtcctgtccggtgacacggtcgtgctgtcgcatatcaccaacccttcacaagaacgtgtcctgagtttggcttatgtctctgctccaagattaaggagagagggtgatgaggtaggtgcattgttgagattgattgcctgttgattgcaccattggaagaccaaattgctgcttgtgtgatctccaaattggctttctggtcacaagagctccatttagcattgaacaaatggccctacctaaaaagcgaagagatcgaaagagataaggctaatccaaagaatcaattatagccatacgccttccaatcacgcgaattcctccgcgagctccttgtcggcaaggtcatccagttccacgttgtgtacaccatcccctctggtgccaagcgcgactacggtaccatcaagctgcccggtttcgatgcctcattgcccgatatcagtgtgcaggagggctggacccgagtccgcgaagaagcaggcaagcgtggagatgaatctgaggagaccattggactcctggaccgtctgcgggcattgcaatccctcgcccaggaggaaggaaagggaacttgggctggcggtgacgacgggcacatcgacactagctacgaattgattggtgctcgggatttggttaaacgtaacttgggtcaccagctggaaggtatcattgagaaggtcctgaacggtgaccgtgttgtgctgcgtttgctgctcaagccgcaggagcacattcagactgtcattgccgttgctggtatccgggcaccatccgctaagcgcacaactgctgatggcaaggagaccgcggctgagccgtttggtgatgaggcactgcagtttgttgaggaacgattgttgcagcgcaaggtcaaggtttctttgcttggtgttacgccgcagggacagattgttgccaccctccttcaccccaatggaaacatctctcgattccttcttgaggctggtctagcccgctgccaggatcaccactccacacttttaggttcggacatggctcttctccgccaggcggagcttacagcaaaggccgatcgcaagggattgtgggttagccacaccggacccaccactgctggtgccgcggctgtggactatgttgtcacccgtgttttgaatgctgataccctctttatccgcaacaaggctggacaggagaagaagatcagtctcgctagtatccgtcagccaaaaccctccgaccctaagcagtctccctttgctgctgaggcgaaggagttcctgcgcaagcgagtgattgccaagcatgtcctggtcaccgtcaacggcaagaagcctgcaaacgaaggctacgaggagcgcgaggttgctactgttgttcacggtaacaccaacgttggtttggctcttgtagaggcaggttacgcctctgtcattcgccaccgcatggacgacgctgaccggtctcccgactacgatgcgctgctcgctgctgaggctgatgcccagaaggagggccgtggaatgtggacttccaagcctcccaaggcgaaacaggtggtggactattcagagagcgtgcaaaaggccaagctggagcttggtatcttgcagcgccaaaagcgtgtccctgctgtcgtcgactttgtgaagtctggatctcgcttcactgttctggttccccgtgataacgccaaattgactctcgtcctgtccggcatccgtgcccctcgctcttcccgcgggcccagcgacgccggtgagcctttcggccaggaggctcacgaccttgccaaccgccgctgcatgcagcgcgacgttgagattgacgttgagaccattgacaaggttggcggattcatcggcagcctgtatatcaacaaggagaacttcaccaccgttctgttggaggagggtttcgccaccgtccatgcatactcggctgagcagtctggtcacgccgccgagtacttcgctgctgagcagcgggctaaggacgcccgcaaaggtttgtggcacgactgggaccccgccaaggaggccgctgaggctgaggaagccgaggctgccaatggcgcgggaactggcgctgaaagcgatgccgcccccgcacagcgtcgcaaggactaccgcgacgttatggttacctacatcgaccctacctccgccaagctcaagctgcaacagatcggcaccggtaccaacgcgctcaccgagctgatgagcgctttccgcaagttccacatcaacaaggccaacgacaccccgctgcccggccctcccaaggctggcgactgggttgccgcccaattcaccgaagacggcgcctggtaccgcgccaaggtgcgccgaaacgaccgcgagaaggagcaggccgaggtagtctacatcgactttggcaactccgagattctgccatgggcatcacttcgccctcttacccaaccccaattctcctcccagaccctccgcccccaggccattgatgcagtcctctctcttcttcagttccccacctccgaggattacctcgaggatgctgtcggcttcgtcggcgaccagaccttcgaccgtcagcttgtcgcgaatgttgaccacgttgaccaggacggcaccctgcacgtcactctcctcgacccctccgcttccaagaacctggataacagcatcaacgccgacatcattcaagagggtctggccatggtaccccgcaagctgaaggcgtgggagcgtgcctccgtcgataccctctccaacctgcgcgcgctcgaggacgaggccaaggccgagcgtcgcggtatctgggagtatggtgatctgaccgaggactgacttcttgtatctatttgaattttgagctgcacgagggtgacctgtacagatattggttgggatggccctatgattagcatctggctgtgccatatacactgagatatggtgcttatttttaatttaggccggaaatttattgcattttgtgtttttatatcgcctgtttcgtctgttactaccttggttgatccggccaattagctttgttgatcgatggatcggcgatgtacttcggcaggtgttgggcaaaaagatactcaacgatgttcaacgatgttcaacattctcaagaagacctaaatcccacctgtgaatctgatagagagcaaagatgtatcacaaatagagtcaacccccagaaaacaccgacgctcgggtcaaaacaccgtcacatttatttcaccgcctccttccctccgccacctccgacgtctgttttggaaagggcgatctctcctgcaaaaaagtaaacaaacttgagagatcagagctcaccatgttttggggcaacaaaactccgcaggactccggagaggacctggcccgcaccgattcagctacgaagaacgatcccgccgcatccgcctcacaagcttccggcaccgcctggctcgccgggcacttgcaccaccttacaccggagcaggaggaaaagctggaagagttcaagaaagtgtgcgctgagcggaaatattacacccctgccgtgaaacaagcagatggcgtcgaggcgaagccggccagccaggacgatgcgactttattgtatgtgaatgtggcgcgtccaccttaaaccccaatccagctagaaatgaacaaaatcaaaccgaacgattgagtgctgactttgattatttgcgcaggcgattcctccgagctcgcaagttcgacgttgagggcgcgtgggcccaattcaaggacaccgaagactggcgcaaagacaacgccatcgaggagctgtatgcgaatatcaagattgactcatatgaagccgctcggcggatggtgcgtgttataataccctgtgaaatgaataccccgacctcgtgctgacatctactgtctctgtagtatccccaatggactggccgtcgcgatcgccgcggaatccccgtctacgtcttccagatccgccacctggatcacaaggctgtcgccgcttacaactccaccatgaatagcggtacacccgagacgcacaaatcatccaaagttcctgcgcgcttgttgaatctcttcgcgttgtatgagaaccttctgcgcttcgtgatgccgctctcctcggcgctgccacgtccgaacccggagacgcctatcgtgacgtcgaccaatatcgtggatgtcggcggtgtcgggctgaagcagttctggaacttgaagggtcacatgcaggatgctagtgttttggccacggcgcattacccggagacattagatcggatctttgtatgttgcgcccccgtttaatacgtccagggagttgaagataagttcgtgaaactaactcgctgtcagatcatcggagcacccgcattctttccaaccgtctggggctggatcaagcgctggtttgacccaggaaccacctcgaagatcttcattctctccgcctcagaggtcacgcccactctcaactccttcatggagccaaccagcatccccaagcaattcggtggcgagctggactgggcgtggggcgatatgcccaacctggacgagcccaccagcgagctgctccgcggcatcgagcaaccgctcgccgagggccaaaagcggagagaaatcatcaagggacctgttctgttcaacggcgatcacctccaggtcctaggcactatggatggaacgcagacgaagcggagagaaatcgttcccatcccgaaactccaggcttcggttgagtcagaggctaactccgatagctctgcagagaaggcggcgcctaatggcgcagagactaaggtagacgatagcgagaaaaccatcgacaacgtggcggtcaaaatcgaccagttatccgtcgatgagaatcatgtttccgtatagagcacagagcacatagaaaggtagcgggaataccgtgttgggatttgtgttggacatacaattagcgatgtgacatagcacaagatagcgcagatctcaataccgaggcatatttttttcttctctctgttttgttcttggatatatgtcggtttatatattatcatgaagtgggaactgcatgtgcatatgcatctatggcatgatgtgggtggcatgttggggtatgttctggtttcatcttcccaaaatttatatactctctccccgtatggagtagcttgctctggtttgttctccatctggattgactcgtatttacactgttcatgagccttgattatgcttgacatctggtcgtctataaaatgtactcctttgagtaccgaacagatgtgcatcaccatatttatatattttgagtgcgtccagtatatactgtagctaagtctctatgaagatttactaagagagtataactcatccttgagcatcggataatgaatcatacagaaatccccgaaatatatgcaagtcgaccaattagaatgagggctttggttgagcacatgactcgagcccatgtagatgcagacgcagggcaacgtctccacatcccatctatccggctgagtacgtcgaacatctagaaacgggtcgtgattaaccaaggaaacataatttactcatgaatgtccttgtatcatgatcacccctcaacacgaggtaaccatgtcaggcccaagcggtagctcgctaacgcggtaaacggccatgttgttgggaaagagatccaagatgagatatgatcgacgccacgctctaacccagtcaaatgcccgaggctcattttgcggggagcgtgaaagagtgggcattcttcttcacatgcgccgagcgtcgccaatggccgaacgactgggggagggatcgacaataagcccaagcacataaacccactaagccccgtacctggggtagatcgaagcgtgcactccgacacccttatacagatcacgaatcagccatgaatcgtaacgcaaaagactccatgaagtccacctggcggcagcaagcccgctcagagtggacactcttccactggttctacgaagtcctcggcatccaccccgaacacctcgacaagaacgtgcccgtccatctaaaggaagatgccgtgccgtacatcccagactggtccatgcaccgctgggtgctcacgcacgccgccatccccctcctgatccaccacgcgtacgtcgagatcaccggccacaacctcagcgcctggggcgccttcttcctctacggcctcgccttcaaagccatcgccatccacgaaatccacgtcctacgacgagtaggccaccagcacggcttcctagacggcgacaagcacgcgcgcgacggcgtcccagacgtcggcgtcgccaaggtcgtcttctcactcatgttaacatcaaccctccgcccaatgttcaccgtcttcatcgcctaccacgccacacacccgccctccacgatcagcttcctctggctgcccctcgaagccgggctgtacggtatcgtcctcgacttctggttctactggtaccaccgactgatgcatgacgtgggcgcgttgtggaaataccaccgcacgcaccacctcaccaagcatccgaacccgctgctgacgctgtacgcggactcggagcaggagttctttgatatcctcggcatcccgcttatgacgtatttcagcatgcgggctgtgggcatgccgatggggttttatgagtggtgggtttgccatcagtatgtggtattcgcggagttggcggggcatagtgggctgcgggttcatgctacgccgccgtcgacgttgagttgggctttgcggtggtttggggcggagcttgttattgaggatcatgatttgcatcatcggaagggttggaggaagagtcataactatgggaagcagacgaggctttgggatcgggtctttgggacttgtactgatcgtgttgaatcggttgagaacaatgttgattatgtcaattcgtcgcctatgccgttgtattgagtgaggttggcttgttgatagttttgcttctggtgtggaaatcagtacttataaagcctgtgcagtgttgcagagggttgttgacatggttgctattgttttcttttgctcactagttacactgtttgatgcgacgttggatcctttggatatcatgtctatgaatgaaatgttccccatgaccaatgactttctgtataccacaccgcatattattctgagcaggcatattcttctgagcaggctagtttggctcgagtacgtggcgagcaaatatggtatttaagatgttactatatgcagagaattgaagcaatgtatttattacagtttaaagcacatatggcatctggtatatgagcctatcaggcctaagccctccacagggcattaacttgcttctttcgagtctagacaaaaataattagcaaatgtaccgggagcagttagacaaaagacttaccatcggagccaaaacggcgacacccgctccgagtgccaccacagtgagaacgagttgcagcttggagaagctcttgccaaggatatcaaatgcctggctgggcgtagctcgggtaccgaaaatatcgcttccgtaagcgaagatgagactggtactttccaacagggtagggcgagagagcacagcattgatgccggcgacatcgcgcgtgtgcgagaggtaccatttgccatcgaagtcgaggtagggggcgtagcggaataggccttcttcggcttcggccgcggtagggtcacggtcgacagggcggcgagggtcgaggacggggcgaggaatgccgactatggagttggaggaggggagagtgcaaagaagctggcgggtggtgattccctggcgcgtttgagtgacggccatgtgggagattgattcggggatcatgaaggcctgggagatgacgtagggcaacgggaggatggcggtgctagagtagtttgtggcagagtcaaggagaccacggtcgttgggcaagggggattcgtagagctccgagatgaccagctggtagcccttggcggaggactcgcttccatcaacgtcgccccagaacgagtaggcgaaccagttctcggacatcgcggaagcaatgggttgcgtagagtccacgcctgcttgggtggatgcgtggatgacattgcctgagactccgtctaacaggtagaaactggcagtgtgggtctgctcgttcactgcagtcaccagggcgaggttggggttgaggtacttgtaaaggaccgagcggtttccaaggaccctgccgatggacgccacagggtcatgcgcaggacgagcggtcgcttcgacgaccttctgtccggagggaggaacaaactcccacacaggagtcttgttatccttcgcagcccagccgaggactcggccatcaatgctagtggttaccaagaatccatcttcgttggcaaatgcagcgactggtgtaccatcttcacggataccgacggtggccagcgagcttccatcctgcatctcgaagacagcaatcgagtggagtttgctggtagatggttcgatgcgggaaacgatctcccctgtcgacacatccacagtcacagagcctccgtcgtcggagtagatagtcacgactcctggcgaagtcaacatagccttcacattccagtccgatgtctccactgcctggatgccccaggaaacggcgccgtggtttccagtatccaaggcgtatacacggccgctcttggtggcgacaataactgatttggcaagtccaaagctgtccaggttggacacttcgtcggtcaagatactgctcagaatgcgcttcggcagatccttcagccagtcgggtagatgttccaagtcccggacatgacgcttgacccggtgtaggtacgcgccgtacaaagtctcgtgaccctcgacctccaattcatgggctagatcttcttgggcgtcagtttccgcccatgtagctgcaacagtatcaatgagaccctcatgccgagtccactcgatctggccatttcggataagttgccagtctccatacttccggaaaagtgctgtcctaacagccacggactttcctttggcgacaacctcggataccgagtgaagggcaatatcagatgaaggcttttgtagatcccatcgtcccagaatcccatgagaggcggatgatacaacaacggcctccaagtcggtgactcgagtgaaataaacattagcgtcaatgacactgactgcaactgctgactggccggagagatagggtagccggtaagccttggtgaccttagcagacaccaagtccacatggtaaacctcagcccaggctccggcctcagtttcaaagtggaccaagaaatggggcagagcattaagcttgtggggagcgtggaccgtgatttgtcgaattccggagccggaggtattgtcaatggcgatagaagtgacctccttagtaccaataacattgaccttcagggacttttgcgatttgtcggcccagacgatgataggcgaggcggaattagcgcccacatagaggacggactccggggtagccacatcagcctcagagttcagaatttgatgacgagtctgtcgcccagtcaatggatccaaaacagtgactttgatcttgaaccccttcaacatagccgagtggagagaaatatagaagacctcggtggaagaagacgagacttggaacgggatgtcgccgctagaagaacaattgattagcttgggacaggttaaaaaaaaaaagcaaagacgagaccaaccttgcatccttgtattcccaaacagtctttccagtattaccatccagccgtttcacaatgccgttgccctcgctagcaaccacagcaatcgtatctctaaccccggaggtcgcggtggcatcctcaagctccaacagctcgagatcgccaaccacaccctcggagacccgatgttcccatcccagcttgccatcctgggcactccaagacgcgatgtagttatccaccgcagctacaacggcatcgttgccatcgagtccgcgcaaaagacccgccccatgtgcgggagagtctgccgaccgcgatatgttctggcgccataccagtgcgccgtcacgggggttcacggcacccacaagcaacttgtcggatatggtatatataagggaggcatttgaagacgtgaatggcttgaggaagaaggtcgagtcgggagatggagtaccgagaagagcgtggtggaagtcgatgtggtcgacctcgtcagagtagatggccgccgcgggagataggcacgcagcgaaaaagagcgccgcctggagccacattttgacgagtgactcttattgaagcattgaagaggggaggtgggaggtgatgtagaatggatgttgtcaatacaagcttggcgtccgggcggtgataacccagatcttctgtctacaaccatgaacgtccaacctcgctccctcattgcctaatgtcatggcaatagaataaccacgacatctaaaaatacaataaaaaagacactacaaggccgcataagcgaccaactattcttcatcatcaagatggccccatgccgcagtgcgaataccgtaagtcaagtatctgatagaaacaatgccccagagatctttcgttgtagttgagtatgttttttcgaacaattcaaagcttcgtagacgtaagaatgaaaagaagatatctagattccatacaacaagctaaagacgtagccaaaaacatctagatcttggtctatcagactcgagtccctcacatctagctccactacaccagtcaattcatactaaagccagagccctccagctaggaatacggtttggcagttcctatttccagactatgagtttgtaatgctaacattactattagaatgacatgcacaagaagctgagcagactagacttacatcgaaatccaccgaaagggctagtatctcatcgtccgttgaaatttgcatgtactcgaactcgcactcgagctcctcagagttattagtgggcctgccaaaccaattgttcatcggattgaaaagtggacgtattgcgcgaaaagctccgattccaattatcacctcaaatcccctaagcggccttccttcaaaaccaatcatcgtttgatttcctggagcgcgatagccaagaatattgttcggcatatcactaggataaataagctctaagccgcaatcttatttcaagtggaatccattcgaagtagtgtgtaataatagaatcacgcagaatgtatgatccattcgtggctggcaaggcccgagcagctgcacggaaacccgcgccgcgagcgcattgctgaaagctcggcggcttgagttcaaacactacgatatgccaatattagcaggattccattccttgctataggaatacaatcaaatgagatggaatcacccaggtggtctatatcatcgtcgaggcatcgcggggtttttcgcttagggtttcaagcaacttctccagatttaattcaccacctttgaactggttcgaaagaagcgcccaacaatatctatgaatctaaaatccatttggtagatttgatggggggattttttctaataatttgctaacctcttcccagcatgtatcaatgctagagatctgttagctgacccccggctgcagtcaaatgaactaagcactaattagcaagtacttccaatagcagattcacaggatcaagacgcacgaaaaacgtcacggtcagacaaggatgttccgcatgatacacaagagcgagagaatatcgcatccagagccaggtccatttctgacttcttgatgatttttgagttgtttttcgtaatttggaagtagcaacggttgtttgtcgcttagcctagtgtcgctatcatgattgcatcatcatactcctattgcgaaaggtttccacagctagattagaaattaatcgtagtatgagagtagaagggctatccttgacgtctggagaccggctactacagcatcggatcccagatatatctgcactaagagtaggcttctacatcaatcaattattaagaatctaagaaagtccacagtttgttgaacttgctctcttccataaaagtaataaataaatatattgtatattgtgccttagtatgtactagtttctgaacgacacatcccagcaaaatcgctcatttatactggttgccttgtctgacagcgaaaaacgactttaattacggtcgttgtcgaggaatcctagattgacacgcaggttagcatataaaaaggcttcaggcaaaaacaagggtcacgaaccttcagccttgttcagcagctggttaccaaagctgccactggaagagtcattgttgccagagttgccgtagctagagttgttgttgctgccgtagctgtcctggtcgcgaccagagctagacttgttgccatagctggaggagtcgttgtcaccatagctggaagagtcattgttgctaccgtagctgtccttcttggaggactggttgccgccgtagctagaggaatcattgttgctgccgtagctgtcctggttgccaccggagctggacttgttaccgccgtagctggaagagtcgttgttgctaccgtagctgtcctggttgccgccgtagctggaggaatcattgttgctgccgtaggtatccttcttggacccagagctggacttgttgccgtagctagaggagtcgttgtcaccatagctggaagagtcattgttgctgccgtagctatccttcttggaggactggttgccgccgtagctggaagagtcattgttgctaccgtagctatcctggttgcgaccagagctagacttgttgccgtagctggaggagtcattgttgctgctgccgtagctatccttcttggaggactggttgccgccgtagctggactggttgccaccgtagctggaggagtcattgttgctgctgccgtagctatcctggttgcgaccagagctggactggttgccaccgtagctggaggagtcattgttgttgctaccgtagctgtcctggtcacgaccagagccggactggttaccgccgtagctggaggagttgttgtcaccgtagccggagctctggttgccactgccgtagctgtcggagtcgttgcggtaagacattttggtgggttgtttaggggggattggtttgtgattggagtgaaaggaagaagatagagtgatgagttcaagggttatgatgcttatcccaccagcggcgagcgctttatttatctcccaccaggaagccggccagaatcgaatagaagagaatcgcccctcgtccgtaaacccctcaatgacaacatgtggacaagcgaggcgagcaggggccaatgaacatggcacggagaagctagtatatccaaagctcactagtttcgtgcttatatgttagtgattgctcgaaccttgggagccactttttcagcttaggagccacatttcagcttctgtggcctaatcgggacatgaccccctagttgacccataattgagctcgatgttgtgatatcatccaatctgcgaacagagaatcacgccatggagaaagccatgcgggactctcatttgccggtcgaatgatgtagctcttttccggagccggacttagccggagaggtcacttcccctcattacttggctcggtcattggatactgttatgcaggtaaagtctagactcctcgatctgatttgatgataggtgggatgtgtatgttcttaaacacgtacgggaagtacagagtagccctgggaaccctggaaaccctgaaggggccctcatttctttttttgggacaggcaatatgataatgtagtgagataagccaatcataattgaagatctggcatcttctgggcccacctaggcaagatctacctcgatccgcgctattgatttccatggtaacgtgatgcatttatctccgaggtccgcccggaatcttggtttggctttgccagtcccacggttcagataatgcacatccctcggtgtggctgtgcatgtgcaacctacccctcctcgacgccaccaaggtggtcagcctcgatttgactgcgacgtactcctccgtacaacatatcgaggacaagaattacccctatccacgggtggttttttgggtggtttttggggtagtttttgtgatgatttttgtaattggactgactacacgcaacacgtgtcaaaaaggtataggtatactgtacggagtagacaagtctgattttatctatcctatctgcgtagtctctgtctgggtattcattcactcattcctccccaagtatcattattactctcatccaattattggtttagttggagatcttgtcgctgacgtgcttgctgtatggtagaatcgaatgttagcagatatccagagcaagcaatttggagtgtcacatacccagtggccttctcgtaggccgagcgggcaccatcggttatcttctcctgcgtgttgcggtcgacgttgtagccagacttcttgacacctgcaccgaaggctgaggcaaagcattgtcagcgcaaattcgttttacaccaagaacgataaaccactcacccttgtcaacgtagtcgtcgctctgctggttgttgttgctgctgttgttgctgctagactcgtggttgccgccggagctggaaacagccttcttgatgaaatccatgatgatgatatgtgtagattatttggatatttaacagagatagatatgagtaaaaaagtagacaagaagaaagagagttgtatttgtatctggtcacagtagggctgcccctcttctgccaagtttacttgagtggcgattcgtcgtcattactccggtgtcttaccgcccccatgcctttccaggtatgcagtctgggtcagggtgggatggtaagacggctaattgcgcattgcggatcggtgggctaggctcgagcataaggaaccctaataggccatgatcttcaagtagtaaaagtaataattgagacttattttcaaatacaagttgttatatacatctttgaatgaaaggtaactccaaaaaaatgccatccaaatcaaacaaatcttaaacaccgaaacaggccttattggcagaccggatggcttccttctcaccctcgctcattgcgtcggtgatctcccaaggggtgttgcctaagcccatagcacgctgaccctctgggctcagcgccgaccaatccatagcacccttgaatcccgactcaccgggcccaccagcaccggggaaatcccacggaggcgaatagttcagcgcagcctggcgctgcttaagaaggtatttcacattcatgtcgcacagcggggtagcgggaatgtacataacactagagtcctgggtaccacggtgctccttgtccacggaatgaagagaatcgcagtgccacgcaacaaaatcaccaggcgcaacctccggtactgaaaccatagtcgactcgagatcgagatgcgggtgtgtaaccgggttgtactcctggcaagcgccaggcacggagccagggaatgtagcatccaaggccggttttgaggtttcgacgtcgaagaacggacgcaggatagtgtatgctgtgctgtggttgatcatggggcagacgtgcaacgagccctcgccaggcttggtgtccgacatagatagccaggcctggaagaaccgcaacatggagcatgcaccggcgccattgtataggtccatgttggcgctcagacggtgtcgcgcatcccatgcgtcgtattgttcccagttaccttcgaggatcttggtgtagactcgagagtactcggggtcttcccagcgctcgagggacccaccgtcaatgtgcggaccgagggtgaattttgagtcgcctggatcgcggatgcgtagacgatctgcgtaggtgagcggattggtggttgagatcttgctgttagggtcggatgaatgccacagctgctgcatgaagcgctgggtgttgagcatgttgctgtgaccgcgggcttcggcctgtgatggagtccagtacagctcgtagacagctggggagtcagccgggaaggccttgactcgttctttgttggcggccacatagtcgcgaatgcgctgcttatactctagggcttggtcccgggggactacattgcggacgaccgcactgcctcggtggcggatttcttttaatgcagcctcagacacatttccagagatcacatcagagtaatcaattgagggaatgatctggtatttgaaagtcagtcttttgctcggtgttgcgggttacatgtgcacgtacgtcgctgccctttgccttgatcttttgcacttcttcatccaagctagggagcaagcgctcccaactctttgtaattgcatctttgtttttctcgaagatttgcgctttcagatcttgaaaccgtgcggggagaggttctggcttgtagtcgggccttaagctggggaaaacggatgagatatcaccggcggccttggttgtctgggtcgaggtagaggccgctcggacagcggatcttgagataaactttgatagagacatggctggagtgaattcaagctgcgtattccaactttgcggggatctaccccagtgctttatatgtttttcgtggggaacacaacatacattggtcgaggcggaatcattccatatacagtaatcgagccgccgccggaaagagatgggccgcgaaattactacattaggagatcgacccgcatccggtccgtacctgcaggcgcttaccataggtacagcttctgttcatgacatcagcctacaaatcattatttatgaggctaaggatgtcaataatggagataagttctttcgaagcttttggcggttcggagagatcattcgggaatatgccaagccgggtttcgggatagaacatctgcattcggccgaagtactacggagtatacaatacaataggaatggaacactacctgccataccacggcattaactgtggacttcaattgaattgaacctgcgttatcttgcttgaaggataggatcaagtgaatgttatatgtgctgcagagcagttctacgtatgtctatatatctcgtagtgaccccgagggcaattctccgagggcaatcgacctggtccacggtttatataacccaagaaccaaatgaaggcatgccgagttctctctattgtaatgtctcactggctgatccaaactacagtatctagcacatattcgcatcaaacaatatacataagtgctttcatgaatagagcataatatcaagaagaggggaactgctgtcagatggcctgatacgtacccaaggagaccggagaattagattggattgggcctcatccagccggcctcgtacgatgtacataggtacaaggatcgcggccacgttggcctcaatccttcctctcgtccgaccggttagattctagtattctaccccgcgaggggcagaaaatgggcacggaatatgtatgccgcgcaaggtccacgatgtccactctatgtataaaagagggctgaatcccctgctagaaaccgtataactcaacccgtcaaccgttaatacttaaacatgtctatctctgtgcaaggaaagaccgccatcgtaactggagctggctccggtatgtctcctgcatactgcaatatcaaacggaagcttacacgtagtcaggtatcaacctctgctttgccagattgctagttgaaaatggctgcaatgtcctaattgcagacctagccttgcgtcccgaagcgcaagtgttcgtcgatgagcacaagaccgattccccgcgagtggtcttccaagagaccaatgtggttgactgggctcagctcgagcggatgttcgaggttgccgagaaggagttcggcgagattgatattgtttgcccgggcgcgggagtctacgagccggtaagaccaaaaaaacccccaaccaatctacaagtctaactagaacaatagctctggagcaacttctggcgcccacctggcgcgggcgacagcaaggactcgcccactggcgggcgatacgctataatcgatatcaacctcacccacccgatccgcacgacccagttggcaattgctcatttcttgaacaactgtaccagcggtcgcccgaagcatatccttcatatctccagtattgcagcccagaatgctaatctcgccaacccggtttactgcgccacgaaacacgccattagcggctttgtgcgttcgctcgccaatctcgacaagaagtttggtatccgagtcacggccgtggctcccggtgttatcaagactccgctctggactgaacacccggagaagatgaagttgattgatggtagcgatgagtgggtgacgcccgaggaagtggccgaggtgatgttggcgcttttgcagcaggatgaggtcagcgagactatcggcgaccggtcgggtaatgggcagcagtttaaggtggagggaggtacgattctggaggtatcaaagactgtgcgcgcagtcgctcaattcaatgaccctggtcctggcaatcgccctggaaacacggcgtcggatcatcacgaggtcgaggaggagacttataagatcctggagcagaaaggatggggactgtgaatgttatagtcagttagtatcaaatacaactccgacaattgtataaatacctcgaagtgcttgaaatggagttgatgttgtagcaaagtaccaagggcgggtcatgtgtcgacccgataagctttggaaagtcaaggttgggctctcaagtggccacggatctttctctccttaaattcctccgccttttccattctccagggcttttctcttcattgcaaaactactactaatctctctcttttggttttgcctcggccccgctggtagcggccgttaattatgttttgcacgccaatcgaccgataacaccatttccgcaacagataaccaatatcaaaatggaggaggccgcgctcggggttggtccatccgggggacatcagaatatgctgcgcaggtaggccggagcccaatatcttgatgttgatggtggctaatttggattccattagacgtgcagcccgtgcaagacctggagatgtcgtgggggaggccagttgggccagcagtgtgatcaacctggttaataccagtaagtgcgaggaagcgcaccatacaagagtgctccgaattctgatacaatttctcctgcagtcatcggtgccggtgtgctggcgatgcccctagccatctcccgtatgggaatcgtcctcggcgtctgcgtcattctgtggtctgcggtcaccgcaggattcggcctctacctgcaatcactatgcgcgcaatacctagaccgtggaagcgcctcattttttgctctatcgcaaataacataccccaatgcggctgtggtctttgactgtgcgattgcgatcaaatgtttcggagtcggcgtgagctatctcatcatcattggagatcttatgccgggagtgatacagggctttgtcggtagcgagcctggatacgattttctggtggaccgccacttctgggttacatttttcatgtgcgtagcctcgtgcattttgtctaaacgaggggaagtgctgatcatttgactttaggctgatcgtgattcctatttcctacctgcgccgtttggattctttgaaatatacgagtatcgcggccttggtgtccatggcctatttggttgtcttggttgtgtataagtttgttcaaggagacacgatgaaagatcggggcccgattcgcgtgggccattgggagggcgcagttccgactctcagcagtctgccagttattgtctttgcatttacttgccatcaaaatgtactttcccaagtcgtgactcgtcggttctttctaacaagcattttagatgttctccatcctcaacgaaatcggcaataacagccatttccgcacaaccgccgttgttattgccagcgccggtagtgcagctgcaacctacatcctcgttgccatcaccgggtacttatcctttggcaacagcgtaggcgggaatatcgtcggcatgtacccaccgggcgtgtacgcaacgatcggccgcgccgcaatcgtcatgctagtagtcttctcttacccactacaatgccacccatgccgcgcctcagtcgatgccgtcctaaaatggcgtccccgagcacaagtcgctggcgcagagagctctccaaaccgacacccacttctaggcccgcgcggaaaccgcacgccagagccaatgagcgaccttcgcttctccattatcacaaccaccatcttgattctgagctacctagtcgccatgaccgtgtcctcccttgaatccgtgctggcatatgtcgggagcactggcagcacgagcatcagcttcattcttccgggcttgttttactacaagatctcatcgcccgactcgcctacccaccagggcttaatgaaagaggacgatgaggcggaggatgatctctcaggagatgacgacggcgacgacggcgagggttccctcgctcgcccattgacagagagtggccttttgcaccgtggcacccgccactggcgcaaggcgctgcttcgccgactcagcctggcattggctctctacggcctcgtcgttatggtggtgtgtctggttacgaacaccttcttcaaaatctcacattaataggccgcgtcctttatgtatgaagtctctttccccttcttgttggccggagcccgtctttttaacatctttcaacccgccgtgtatctcaggaacttctcccttgggctttctcgcctgttcatcagtctcatttctctttccatattcttctccgtttgcgcattgctctctatgttcgctgctgtgtctattctgttgttggtattgctctttgcacgtttaagttttatttgatttgggttgtccatgctaggcgtttggatgattgtgtgtatttggctcgatttcttaatctatactgttggctgcattattacgcgggtatgcaatggctaattgctttggtaaggaaaaaagagggaagataggattcaaggcaaacttacagcgaacagagttataagaattcaaaatatgaatgaagagaagtgtacaaagtgattaaaagacccgatgtaaagcataaaaccctcattcgaaactaattccgagaagcaccaaaacgcaagcttatttgtcaagtttgtttgctatcggaccagagcctgctacaagtatgcatgtatctctcaaccctcaagacatttcaatgcgcaattagttgttgttgttagcaccgttcagaatccgcagaatggacatgaacaagttaagcacgtcgagataaagcgagatcgaagcagcgatctcctcctcaacgtgatagtgccgcataaccaactgcgtatcgacgagaatatagcccgagaagacgagagcgccaagaacaccatagatgatctccatcgtgctgttgaatgggataaacatagccacgaacccgaacaggaccatgaaccacaacgcgccaaacaggtatggcatccagtcggtgaaatcgtacttagtctggcatgcaaagagcgtcaaggcgacgaagattcctagtgttagtgcgagcgcttgcaccactactttcgcatcgtagaaagatgtcgccacgctgattgagtacgcttcaaggatggtgaagcctgataggaaaagaaggttggtcgggtaggactttcgtttccagaatgttgcgagcatgaatcccagagcaccgaaaactgagattatcatcagccagaagttggactggatccaggtgcggtaggagtcgttaaagaaggagattgagctgaggatcgttgtaaggaggagttgggccgttctgagcgaggagtgttagtatattagagcccacgcacttgagtctgcgtttgtaaatcgtgttgcacttacagaatcgagtacactttgcgcacgaattgcattcggatgtcaatcgttccttcggcgacggtacctccgaactatgcgattttatcagtttctgtctttctagccgggctcaagacccctaaaaggcatggtaaatgcataccttgaaatcatccggcagattgtcatcctcaccacgaggcgttgactccgctggagccgctgtggcctcgtaggagggaggggctcgggagtaagacgggtcatccaaggagtcccgctgaggagcaggctcgtatctggtgtttgcagccatgatggtatagagatatgtttggtctcgcggcgctggtgttgaacgttgaaatggatcgccgaccaagaggaagatgagctgaagcctggaggtggagcccatatgatgtgacgagtcacgtgcgataagccacatgtggggcgcgcttgcttatgttatacatacactttgctcgggtggcgcccacatgggtaggtggaccggggacagcattctatatacttttcactgtattctatttttttgcgggttaatatctcgaagatataagcacaggaaagacttcgaatcatataaagttctaaaacgctttcaatatttgagcttttataatgcactcgtgtcagatgaagcagcagaacagactgctatcgacttccagacccaccgatctatgaagaatttgagttatccgcacaggaccacgcagctgaaccaccgttcgccttgtagctgtccatgatgctgacgacagacccatatgtaccagcgaccatcatgaaactgccgatgacgataacaaagacactccaggaaaccatgaacatccacctcggggatcggtcgaccttccccttaccccaattatcgtacagccacatgcagcccatgggttggaaacacatgaatgtgccgagcaaagcaccgataagcgagacgagactgtcaaagacgggaatggcacttgcgatgacgtaggaaataagaccgactgctgcggtgcagccgatccacgagccccagtgcaccatgctgtttgaggtgaggtgtttggagcctctgagggcgcggacgaagacgaatttcgcgggcaactgtcagtgatgtgttagattgactggatcgcatagataaagagacctagagaggaagtgcttacatgaacgaacagcatcacagtaaccagaagacctggaatggcaaagccatagctgaccttcttcatcgtatcgccggcggagccaagagcaggcgaggcaacataagagccgcagtagtagtagactacaacgccgatggtaacgtagacagccgtcacgctgctttggcagatgatcaacgagcgagtatagtatttggggtcgcgcatttccgatacaatagagaagaatgccggtgtgccagcgtaggcgaagataatcgagctcacggcactgatggcttcactgaatttgggactggcaacgatcttgtagtcagatacccagatcccctcttgtggggctgaggccgggcggtcctgaacgccgacagcgatggtgacgatgaagactatagtacgaatcggttagggctatgttatatcccgtgacatctagggaaaccttacttgcggccaatatgcaagtcagtccaatccacgctaaccaactgatttttccgagagttcggatactggcgaagataattcctgcgacggctgcaacagcaacatagacagccgtgcatgtggcatgactcgagacggagttgagagcgattgacagaccgagcattcctgaaccggcgacgaaaatccagtctagagaggcaagttagaagcgaatctataatcgtgatcattgcatagacctacataggcagaacacaaagccgaaaacctcacgaccgatcacaccgaacatcaagtaacctgcatcgtcgataccgtagactgagcgatggttgagcttaaacacgccgaccatgtagtcggaccacgttgtaataacagcaacgacgatcaggcagataacgcctgggacgaggcctaatgtatcaaaggtgcttgggatggagaggacaccgaggccgatctggctcttcatcatgaggatcaccgttcctgcccatcctacctaaagaggcgttagtttgacccaattggacattccatggaaaagaaaaggaagaaaagaggaaaagaaggaacgtacatttcggtagttgggtccggattcggtgatctctccaaacacatcatcgtggttgttgatatgactattctggatttcacggctctgagatggatcaagaccttcaaggtctttttcgtttttgatatccatcatattgaagaatgggaaatgggaatgtaaggcggatacaaaaactgggtctcgaagtatgcgggatgtcgcgcttataactacaccggatgtctgaccgatgggccactacggccacccagagagacagataagggctaatcacttggattcaacgaaagtaaatggtgaggcgtctgtaatacccattgtgggtactcggtacggagtatattggctcactttacaacataattctacgctagcccggtttcagaactataaccccgtagatccaccagaagctgggcaatgataaattgttctcgagcattttgaacgccttttgaacgtatgactagtccgtggagactatgtggagtacaagtaggtacctaggtcaagatggttggacactttacaaggttctccataactaccccatggggagacgcggagaagttcatagttgtgcaaccttaactaaacaacgttacgcctaaagcgcccagagcgcccagagcgcctctccggatacctcggcaagatgcgtaaaataagagaacacctatgtatttatgctagtacatggacgatcttcatcaatgttatcaggcacgttatctatagaacaacaaagtttaacttacatttcccttatgtacatttatatagataactgctaacctgctattatcaaaccccccagataagctgaacatccaagctttgccacggcagtaccgacgtcagcctcttaccacatcgtgaggggtttaaaagggggggaaagctaaaaagaaggggcgtaggtggcttttcccttcgccaagcagctaatcaccggttgcttggccgctgatgaggcatttgcttccgagatcggcaaccgtacccggtcattgctaaagtgtacgtaggttctttgtatgttgtactccgtacggactacggagtagatatcatggctttcctattatgactcatatctctcttttctagcattgattagacgaacaatgcatatttggcccttttggtccggtactcgagagtgcgatagtgcgatcgtcggtgtccggaacagataggaaggtacacatgggccaactgcaattgtgctgcgaatatcaagggaatggatcaggcggtacatgcgccctgttagaatattttacgtacagagtactcagacaaagcctgggcgctctaactaggacgtcatttttcgcttaaattaacatatggagtagttgaaacctcgagcaacgggtagacaggatcctaacgtcagtttgttcagtatgatccactcctatcatttctgtcgcattctttaacccttgttagttctcgcgtgattttccctcggaaacctatgatctagaagagtccgtgaatgtaggatctatgatgtaggatctacaacatgcatggagttgccttccagaaagccctaacataggtgtcctacactaagacaaacaaagtaagatcgatcctatagataagacattatcaatgacaaaaaatatatcgttgaatcctggagcctggtcgatcaggtcgataggcaaactatgaggtccactggcttgatcttgctcctttgtctcgctcgttcgcagcaacgctcaatccgtgcttatttccgcctctcactcctcacatattcagatatcgaatcgatgtgctttcatacgacatagaatacccatcacgatcgtcgcttcactgccctaacatcccattgacatgccatattggtggcagtgctggcatgagtgtttcaggcaagggatatacagtaatgaacaagccggcagatatacaccgctaggttaatttcaaggttctgaagacaaggagctcgccacacaggatccagacacacccgaggctgaccaatgcgagacatttgggttcgcgcaggagctagcccgggaccgcctgctttagagacatcgccagattgggaccttcagagtccagaactctcgggcgaaagacccatgcagacaagcgcagtctccctcacgcaatatccgtgcccgccttccttcttctatctgatagaatccgagaggacaatgcgactgtattggctgcgctgacggaaggagaagaggaaggaaggagcaaaaaagccactcggcaggcctggcgaacaaacacggcaggagcacgtaccagacggataccattccgagcaaactactatctcgacgtgactcgggccaggtacccgtacccgtaggcgtatcttgtaatatgtgtgtttgtcgcgaagagaagagctgacccgaatcccaatattaatatttatgcatagcaagataagaagtatatgcaaagttactggagatatctataatttcacatcacatccatcaagcgggtgacggccccgacagagaatacccccctgctcatcagcaccgataggcaactggcgcagcctagctgaaacctattcaataatccgacccatcgtgtctctgcgctctgaatccggtctcgattccgaatcctcgtctgtgctcagatccgcctcgtcgtcttcgtccgtgctatcgtctccgccgtctgccatatccggtcctacacttgcgctggacatgtaatttggtagacgtcttcgctcgaaatcctgcgcgtgggctgaggctacaatcgagccgacccggctgatgccaaccgaggggcggcggttgcgggcccgcaagctggacccggacggggtgccgttttcgacatcgccgggcgccatgaaaggtgttgaggcgtgctgctgttcttcgagttggacatcttctgctgagccgtcgaggggtgctgcggctcgtgaggggacatcgtaggggagagggacatcacgggaggcgcggaagaggaggacattggtgcagtgttcgttttcgacacggaagatggaccaaatgccacggcgacagacctccgagaaggcgaccataaagctaagcagggcggactgctgtatatttttgatgaatattgcgtagaagatccagttgaaacggatcaccacatcgagcaccattgcggcatagtatacccatacgcgacggaaggcgaggacttcacggagcattgggttctttgcgtatgggttacccaaactccaatccatgattagatcccacactgaggtgtagacggcgtttaggagggcgaaggtgataaacgaggcttggaacctcgtttgaaggtcgatgcggtacatgctgagagtggcatagtagaggacaccgaataaatacttgcccaagttcaggagatgggggaacgcgttcttcgtgtccagatatcggcgaatacattggaaagctcgccagacagaggggaggcattggaaaaagcccaggagccgagagtgggaggagttgcacttgggagggtagtcccagtacgaggcatatagacagaagaagagctcgatgttccccatagcatatgtctgagaacagtacatgtcaccgaggaagaaatcacggaactcgactgggtagattccggcaagcaaaaggcgccactagataggttagatatgctaatcgacagtaatatgatgctgtatgaactcacattggaaaatgcgaaccatttgcgactcctgtggtaaagaacacgggccggcaagaaaataatgatcacagtcaagccaataaggacgacaggccaatagacatacatgtggttgtaccatgagaagttgagccacatgaataggcccatcaagaaaaggaagaaagaagggatctgtacttgtcaggatgaatgatcagagctattaccgcgaaataagacatacctctagcaactgacgccactctaaggtgtttctggtatcgtattcgaagacaaatgcatgattgatcttcgactttgtccaaatcatacaatccaagcagaagagcaagaaatggaagacgatcaggaaataccctccatatatctgctcgattggtcaatggagtcacacaaaagacgaaagagcgaagaaccaacctggaggagataactggtccgaacttgttcagcgacgttaggcgagcggagatttgacttagaatcaaccaaggccttgatggcaaacagagttccacccatcaacaatagaccggagcggaaagtattcggtgagtaatcaccagatttgttgattgtgtgacggagtttggagacggcgattttgcgattaccgccctcaaagtaacgggcatacaagtcttcgaccgctgtcatcaaactctcaatcacctcactctgtacgaaggacgctttgttgaccttttcagacatgtaccggagcggtggacgggcgtggaccgctttgtcgtatttcttgttaatcttccggaaagccgttcgattcaaataagcatatcccttgaggagctccactccgcggtagaactcctgcaacgcatgcttgagcttacgcttagcggagcgatagggcacttcttgactttgcggatcctgccgccgcatgaagtccctccggttggcgatgaactcccgatcttggggttgcatgccgggagtcgccatctccgccagtgcttccgagttcttgccgaaacggttctttcccaccaacgaacccttgattcgagcattcgtgattttcgcgaacccatttggtcgttgatgtgtctccgagtcatcggatttgattctcttagaagccaggacctcttggattcgctggtctcgcataatatgtaactgctggcgaaggacccgcagtttctcggtggcctcttgttctttcgtcacataaaacgaatcgattttgtgcaattcgctatccaagaactcgaagaattcgtcccgacgtttatcaagctctgatgtagcgctagggtctacctctgccgtaaacacgcgccgcagcagctgtgatgtccggttgcccgaggccaccttcgtcaaggcgtcaccactcgaatagctcgtccgtggatccaattggggcctcttggccggcaatggttctgataaagggcgagagggtgagccgttcagcatgccacgtcgatccatgaccggcgaaggtgtccggagattcccaagtctatctgcagtatcctcatgtggcggatagtcttcacccgggtcaagtgccgggtccggaagttcaaatgaggctacatccgagcctgcggtatggtgctgttgtggcggcgttgcgagtatgcttccataactaccaacgttctcagagaaccgcgatcctggcgtgcgaagcggttgtcgctcagttttgggcaccggcgtggagcgcgctgatggcggcttggcaccacttcgtcgtggcgtcgatgggccattgtattctcctgcatcgagatgcttatcggtattggagggtgtgagagcagattggactgcgccgcgactttgcgggctggaagtgggcggtcgataggacgggacgcggggactgcgatttgccttctgtagggcccgggtgatggccttgactttcttcttgccagtctagacagtacattcaggtaagtacagctgtgacacaatgtggcaatgatgacgaaccttgtagtcgagatactttgcccgccattcaggaacgagttcctgttccagctctctgcggatttggtcagccactggaatgtcgcacactgtcacgggggaatacaaacttggcaaatttcatcctgaccaacaatccaccgtcattgcatatggtttcgaaacctggagtgccggcgccgatccgaacatcaaatctcacacaagtgcgagggttccaaagctggagcaagagtaaacgaaagcctcgccactcctgagtcgagataggggaagacggatagtattggaaagaggacctcgaggaaaaacaagtatgttgtagaaattccaacgacgctatactcagatccgaagattctccccagaaaatctgcaacgccgcaaactctacggagtatcgcagctgaacctatacttttggcacgtgtatgagctcatccacgggcggcgcctgaattgttaggccgcaagcccacacttggtcagccttgtacgctgattggctgggacgtgatctcagacccacaaggccagattcctgaagtttggggagtccaagacctgggaatatcctcacttctttcatactccagggcttatgaagtattgacccgtgcaatgatctatcacttcttatgcagaacgaatacgaaaataccccgagaccgacgcaattcatcggcgattgacccaacgactgtctcctatctaagatacggcagcattggaatgcggccggaatgccgtcggcgtgttctcatggtgatgactggcttaagaaaagccccggcatccctgtgaaagcttggcgcattttctccgtcggaccagtgtcttattcgtaagtagacgtacgtagccctacgtatgtctatcggaactatgccatgcaagttcatatcgtgcatacatatgatctcggggtagggatattgatatcgattttggattacattggatgcttcgtttcaccgctctttgcggatacgaggttgaaatattcaaattgttcgatggatcatatctctttcttactacataccaccagaggggtgttcataaaacaagtttcatcattcatgtattgctatcctcgacacgactggcctagtagttgcggttgtcctcacggtagttgtcgcggccgttgtcgcggtagttgtcgcggttgtcacggttgtcgcggccgttgtcgcgaccgttgtcgtgctgctcgtaacgctcctcgtacatgtgctcgacgttcttcttggcgtggtgctcggccttctcgcggtcaagccagttcatgcccttggtctcggcgagcttgtcgacctcgccgccgaccaagccggcgatgagctccttggccaatttgtggctggaaggcttgcctgttttcaaatacaagtcagaagattgtccattaatcattagttagggacgcaatgcgtgtcacgtaccctccttgcgctcgtggtcctcgtaggccttcatggcagcaaaggaagcggcaccggcaacgaactcgtgagagaacttgccctcatggtgctgttcgccgttgtacacctgctcatgtgcccgctcggattcatctagcctggcgttagcatgattttcgtttcaatagccaatggcgtgatgttgggatattgccggctatgcaggtcgggtcggccctagtgcatgcaagctgtaaggtatgtgtctaagggaattcgaacttaccccagccgtaagccattgtgtatatagatagatgaaagtagggaatagagaaaagtttgtatagtgatgaagaaaagaatacaacgtagtgcggggcgatgaggggatcttatacccaggcaagagagggactacagaatactccagaagggctacgtaggtctacggggtacgttgtactaagattcgggtatagctttctcccctctgtctcagctggagttgccccaccatccaatctaccagaatagtggctgagctggttcaacatgtatgggatagatatgtccgaggtggagcgaagacacccttccgccacacaaatcagacacaactttcagggtgttggcccgtggctgaagctggcagatgcttccgaagaacatcctagtgattattgttgcgtatcttcggcgatgcaggcaacttcattaggaccggtggtggaatcatcccaccaccgcatcgctagtctccgacttcattggaggaccacttggacgggacttcctgtcacaattcccgaattaccgccaggggtgttttagcttttgccggatcccagctgaactgctttttggtccccgggatcgatgtttggtcaagggttgccctgaaagacgctacatgcatgcccagcgttcagttcgcccaacaacggacaagtagcatgatgcactgtgtatgctgtaccaatgctgcttccgcatggcgctttccaaaaacttggacatccggtacggagtacaactttcgactcgctcattacgaggacgtgtcccaccaatgtccaatagcatgtcgatctgatggacccggatgggtcgtctcagccctactccgctatgaattgacgaataaaaagatgagacacaggataccagatccatttcaggtcatttatacggtatgcgttacgcacatgtgcagttagaaaccgatcagcctggcttgatcgagccaagcctcccttctaaggcttgtcgtcgccttaaaattctcggcaacaccagccacaagcaaagtggcggtgaacatgtaactgggtgcacttgcaatggcctcctacaacatacggaataatgagcagtgactttgtagaagtagtctttgtattggtaaagatataatacgggtgggctgacctgaaactaagtatgttgtacatagtacttacgtacggagtactggaacatctggctctaagccacactcggactaaaatagcatcactacgacatgtgtcagatcaatacactacttgattagttactccgttgaacaccaccacttaactatagccaacgtatgaagatccctttcccttgaaacaattgaatgtttcaatctctcgatcagcaatcgcgaatactatcacagtaacagtgagatcgtctcccaattaacgtgaaacccttaccgtaaatactctgtatcgtgtccaaactagtagtagtactccgtagtactccgtactccgtactatgtaccaacaaccctccgtggctggaaacatgagctctgcgccacatacgatcacagccacactccgcggcattctctgagctcaagctccaagctccagctccaagctccaactaaacttagctcaactcaactcaattcaaaatgcctaccaaaacccccgccccatgcgacttcccatccgaacttaccgtgaccatcacacctgccccaccctcccccgcccgctcccaatcagcatccccagccccaaacatcctactcctactccatggcctcggagacacagccgcatcgttcacaaaattcgccgaagccatccggctcccagaaaccaccatcgtcacagtgcaaggcacagcccctctgcccttcgacctgggcggcttccattggggcgacgatgtctccttcgactccgcgaccggcgcgctagacatggacgccggcatgacgcgcagcacgaggattctggtcgaggacgtcgtgcggggcacgctcgtacagaaatgcgggtacgcgctgcgtgagattatggcgctgggtttcgggcagggcggaatggctgcgctggctatggcgcgggagctcgggctgaaggggaaggaagctggaaatggtaacggtaacgcggacagtggggaggttggtaccctctctggtgtcatctctatcggggcgccttatccgttgtcaggatccagggtcgggaatacgaatcgcaccccggtgctactggttgctggcagggattcggtggcggtttcggatgaggcggtgcgtaggacaaagcaggtttttgagttcgtcgaggtgagccggtatgctaggcggggggatgggatgccctcgaatcgggaggagatgttgcctgttatgcagttctttgcgcgcaggttacggagtagacagggtgttcctgagggcagtgtggagattagctgaacatacagcattacctgtgtaaattggatgtcagttcacgatttcgctttgcggtccgagacatgggtgtaggtgcgctggaagacgcaattgggcacatcctggcgtctggaaaatgggtgactcgataacctcgataatggtcgggaatcgacatatcgattttcagctggcgacattctgtaggtttccgtagtccgaactagtggcatattcgaactatcaaagaggggttacggcgccaatcgacaacgcacaattggtcaggacctcgcattcgtcaattttgatcacatccaagtcatctgatcttaatactctttagtataggttcattgcctagccaagctatgagaaccacctctctcaagaaattctctcacgttctaatacaccaaacccaaatcgcaaaaggtaaccatcgatgatcacagtgctcaaaactacagatatgaggctaagactgaccgcatagaacaaacaacatggcctacaacctctcaatagaggtcttcggttccggcgatagccccacacaccgatcccactggggcttcatgatcaacaaacccgggaatctagaattcggagatctcctccaagtcgaggtcgtcgattcagaccggttgtggtacggttttgcgcctcggtacgccacaaagattatcgacaaagcggctgtggggatgtgcaagcttaccgatctgacgtctcaacaacgacacgacgtgatcaagattatcgagaaggtgcctgctcctaagaattcaattggcctgtgccaagattggatttttgatgctttgttgtctttggagattgaagagttcgttccttccggtacttctgctttctggaagggcatggttggcagaccggcacgagaagttgctgctgcttgtgggacgcagtggactgcctttgcttgatacgtttatgtgtttggatgctaggtcagggcatgggattggaatgattggaatgtcagtgaagagaagataatagtatttgtgatgaattgtctcgtaactctagtatataaaacgccttggtatataccaaggcatggtatggcaagtgcccatgtacatagttaactgctcctttctcgagccccaatgtcgggtctcttcacggtccaagggatatcttcgcaaagcccacttttatgcacctatgttcaaatataaaccaccccgctgtgtactgagactcctcagaacccacagaatgaatcaagcccaaatataaactcccaaccatatctaaatgcaaccgagcacaaaaatctaacaggaatcatttcttaatcccaataacagccagattgcgcggactctggccatactcaaacaccgtctcaacccaacactccttgacagagtcattctcgcgcaagaactgccagcgatccaccacaatagccgcctcaacaacctgagaactgaaagccatcagactccacacaatactgagattcttgcgcgtgtgcaagtactccgtttcatagcgctgcaactcctcttcagacatggtacagatgcgcttcttgaccaactcgcctcggatcggatccaggctcagtttgaccgttgcagcccgtacgtacgcagagaaagactcgaatgcagacttgcggagcgacccaactatcagcgctatacccccggaatcggggctgtcggtgtggtctttgtagagatcatcgggcacatcgggtttggggacgatgccgcgatctagaaggacgcgctgcagcagagcgcggtagaaatggcgcgtgaagaatccttcgctgtcggcgtggccccagttatgaggtgcctgtacggccattgagcgggctgtgatattgagcttaaaacctgttgtggtctttgcttggtaattttcatagagtttggacattgggaatccgtgcgggtcccatgaagatccggtctttttgaggcgggggtgggcggatcgaaggatggggattttgtatgttgctggccccaatcgttcggttagaaggttgtagcagcagccgatcatggcgattgccacaacagaagggttgagtactagtgatcggactccgtggtggaggaggtttccgcatgaatgcagagagaccaccatcacccgcgcgtcacttggtttcttttcagactgcacgatgacttcttctgtgctggtcctggtttcaactgatgtctttgggtccacgacgtgctcgatgatcggttccaggtagccatcttggatattatgttcgatgtagctgacagtgcctctggtgtcgacctccggtcgggcctttggtacatgtactacatgtggctttctgtacatcgagccgagcacatcatcggcttctagggtcatatcggctagcatgttagaggtggtgtcttcattcagctcagcaggtttttctggcactgcatcgctcaattccaatggtgctcccatattcaagtcaggaacctctggtttttccgcagtggctaggtctggggctagttctggggtttgcatgaattgcctcttcaatttgttgtgctttgcattatgcattgtcttgatcttttcctctttagccagtcgagcatgaacgtccatacgactagcaccgctgatgtattggtgctttcgctcaatggcaatgatatgcttatgatagggtgagcttgccaacatgcgccccaggtaattctgccccgacccaaaatcaacaatgtgagacaatggctccccgcgacgctcattgaccgtctccgacaaagatgcgacatagcgagagaattgctccacctcgtgcttcttcttcttgttcatgccgatagcgatatgcatcgggagaggttcgctcttctcagatgtggtgaactcgcgacggaggctgaatcgtcgaatgtcgcgaatgtactcgaggagagatgcaggcgggaatgcgcttccgttccaagtcctgccattctcggaactagcgtttgtttcggcgggttcgcacagcgggccaatatcctcccgtagtagcagttgcaggatgctgtggatatcgtgatgctcgaaaaacgatcgccagtcttccggcagtagggatgtgtatagatcgggatcgcgcgtcaggaaatcgaggatatgcacgccaccgcaaaggttcatgaacatgaccgactcggttgcgaatgagaggagggcctggacatattcgtcgggatccttccactcatcggagagtggaagggggtttttaatcgtcatgctagatcagatgtcattaaaagcacggaataagtcgtcaattcgtagaatgagggacattcgatatactgtggggaatgttatcgcttttttttttatcttcccccgcgcgccgctcaaggccgcttagtcatgttcataggtcatttcaaggacgatcatctgaagacaccacgctagaaggagattgtcggatgttatatagcatgtgtacgcatattgcttgctacagggaaccagatggccattaaaacaatctagtcatgtcattgttcaaaggtcatgtcaaagtaagaagattaacataggacaagacgatgtgatgtaaacagaaatgcacagttgagaagggacgattcaggaacacccgtacggattcaaagtccacattcaagttgagatgtagtcggtagctgcagggttgtggaagaagggtaacaccgtctcactttaggctacctaggatagtacaaagaaagaaaacatgacaaaagattgggagggttgtattccgtgggacagtcaatggctatggagtccggatactcagccatgactttcttagagagctcgcacgagaactggactttgatctggtaaaacctgcatggacctcaacaacctggtgatgttgatatccttgtaggtaaagtaccctgttctctgcctgcactgtctcatggggctacggagagatggcggtcgagagggatcgggagaagagaagaagaggaagtggtggaggagcccttttatatggtcacttctcacgtgccagacatggcaaacaacgttaaaggaaggaacgtagcttccctcgtggtcgattgctcttgcctcgctccaggtggcaaccaccatgtctcttctcaaacatctgaaccacaacacaccgcaccagagtcgacgtacgggccatatttgtgtaccttaaagctcatcaggacggacaagagtttcagttgttcggccatgcctcagccctcgatgaatatgtggttgtatctgcctggtcattgtcgcctccgtagtgtgaagatcagattggaaggggtaatttccatgagctttccaaagttgcattcagaagagttactaacagttgattcctcatctagcaaatccaaacaaggccattgctcgatccgtataatcaccgcaaactatcattatccaaagcgctgcaacctacactatgtcaggtttaggatcaatgtctgatacctacatctttagtgagagcggcttgtaaccttttcaaaacataggcattgaaccaaggcccgcatttgcgtaaggcttaagaagagcccatatactgaaccacctaagccaagcttgctccaacgtgcggcaagaaacaatgtgcaaccccgaggatcccgtcgttccacatctagactatttccgaggaagttgaggatttgctggttaaacgtccatcctcatgcaaagagtttgtaacactgcatgccccatacttgtgccaaaaacggagcctcatagtcgatataatcctcacaggcgttcactagatccgtaatatttcccccctaatagcccgagtcgctcatactccagccgaagcacctcatcgatgatatcccaacaagcgtatctcataccgtcaacaacgtaaggagtaccccgtacttgtgatgctagttgggccgtgcgttgggccgagtaggccaaacctgcgcggttgtcctaaaatatcaccgtagagatcagtcagcaacaccgccgctccaggcttacccgtccgtggaccaacccggggccgagaactatcaacaactcacaatacccataccgcagccatggagcacgcagacccattcctacaagttcaagcgtgagctctacaccaactccaagcgcaagtccccaactaatcaacgtaccagcgatgtggtctcaaccctacaaaccagccggccactcttctcctcatacctccgcatccggtcactagccaaaagcccctccaacccagaactcaagcaagcgcgctcggagctcgaaagcacattaacagagctaacagccgacctcaacgacctcgtcgagagtgtgcgcgtaatcgaacaagacccctaccgctttggcctggaactagaggaggtgcagcggcggcgcaagctcgtcgacgatgtcggtgatgaggtcgagaaaatgcaccaggagctacagcagactgtctccaactctgccgtcgacacgctgccgaaccctaccgagtttgatgcggcgcttgaggaggaggagcgcggccggggcggggacgattattatgcctctttggagcagcagcgccagactgagcttatgcatgagcaggatgagcagctagatggtgtttttcgcactgtgggcaatctacgtcagcaggctgatgatatgggtcgtgagttggaggatcaggctgtcatgattgatgaggttgatacgctagcggaccgagttgggggcaagttgtcgaatgggatgtcgcgtatcaaacatattgtgcgcaagaacgagggtaggattcgcttttttattttcccgtttactcctaatctctactggatggacggtttggtatggtatgggaatctcaagttcaaactaacttttctgactagatacatggtcctcgttttgtatcgcagcactcattttcgtcctcgtcttattattaatcctactcattgcactgtgatgatacaaaatcaaggggttagttaaaagcaaaaaaatcaaagggggttggcgtttcgggtgcaaatggtttagtttcgagccttcttgcgcggacgcaactcactgtcttcatcggagtcgtctccgtccagttcctccatatcgaggtccatatcttcgagctcttcgccgatttggaaggattgaactggtcaaagtcagcaggggaacatctgactcgttcgggatctacataccgtagtagctgagcgcatcgggccagaggtcctcggcaatggcaacagcaaggtcatctccatcggggaagatatcgatttcctcaactccctcggtgtcatcttcctcatcctcggagtcggagtcaccggcctcctcgatatcctcgccgttctggatcttggcccagcgagcctcgatctccttggcagcctccttggactgagcggcggagacatcacggccgcggtatccgaagaatccgaagaagctcatgccaacggggctgggctcctcgtcatcctcgtcatcctcgttggcctcggcctcagcctcctcgaccttcttaacgagagcagcgaactcgggcaactttctgcggtcaccgcccttcttcttctcagcctcggcaaggtcgcaagcggcatcgagcatgcccttggtcaaatcctgatccttcttccagttgatgcggacgggctcggagaccagaccctcccaggtgcgggtcttgccagcggcgttcttggagacctcctggcgccagtagaactccttgacgagcttctcgttggtgaagaaggggttctcgtcgccggtcttgaactcaaatgtgaagcgcaagctgcggggctcgccgttgccttgggcgtcgagctcgaatcgctcgacgttcatgttcttgaggcactcgccgagcacttgggcatcggtggccaggatgtactcgtcgatctcggggggagcgctagcaaagacgcgcatccagaactcagcctggacatcggggatgttgatgatctcgctgcgcttctggatcaggggggtcatgagcttgacggagtggcgcactagagtgtgtatgttagcaattgggttatcgataggtgcgcttcttaatgcatggtagagtagcctctgcgagctgttcactccataacaaaatagaaaatcaacaggaacatacactgctcaacctcagcacgggcgaactgctcttccagaacagcaatcttcttcatagcagcctcagggatgctaggcatctcgacacggtcaaggagggactgatcgttagacatgatgggtatgtattcgtgaataagggtcgtaagtaaataatgccagacaaacacgcagacttgagtgttaaagacagaagaataggagaatgaaggaaggggaaataaaatatcagaggggaggcaaacaattcagggacacggcaagaaaaaaaaaaaaagccatgcgcgcatcagaaggagaggagctaagctacatgacggtacttgtgggtacttatttttccatagttttaaagcgccgaggatatgtatctcggtgtacccgtgtgtccaccgggcaacgggcaatggtgggggtggccgcggtggttggcctcaggcgtcgaggactacatcataggctgggagatggagggaaaactctgacgctgatcttgtttgcggtggatctcaacgtggccgtgggttatagattgttctgattggtactgggtaggcttggagtcttggtatattgtaagtacatggaggggtagacaggttcgatgctggtggtgtatggggatataggtcaatgttcatagttataggtgggaaatacgaggtacggttatctgcactctacgccgtatgtatgttgtatcctgctttgacagttgacatatgcaggagcacatctcaccgtatgtctatacaaaccttcaagagccctaatgcatatattatattccaatagtaggttttggtaagggtatgcctaaagagataacgaccttaacttaccttctaaattgaactctatgttgtaaattgttgcaaattgctataaacatgcaccgccacatatctcgccacatgctaatcagatccaaatcctcatcctaacaaaaagaagcggggacagaagaaaaggcaaaaaaaagcaagcatacactccaaactaaaaataagaaagaaatactttatttcaacaacaattccttctcctgaactttcgaagagtccatctataccaggtagggagtatatatatacaccgcacaattccatcctgacacctgggcccctttgataccaggtctgacagttacttttataaatcaaccccctttcccattattttttctctcgaggtccgagtccagaacttcccctcatttgatttgctcattgatttgctcatgcatgaccccgttagataagaggagcggtctgcgtgtcgagcgtgtgaatgttcgatgtggacgcacgggacctgcaggactcgtcaattggggtcaggtcagcagacgtgaggcacgaagcacgtttgtgtcatggtatcgattaatggagacgaaaaagagtcggggtgagtccgggatttggatttggggttgttatgtggcgagtttctatggaagaggaggtgaagtgaagcgaaaagaagcgaataatggattttggaattggaaatgaaaatgaaaatgaaaatgaaattgaaattgaaatagaaatcgggcttattagcgatcgtataggagctagatcgcaggctagtaaccgaagtcgggatatcttattccatttgttttcttttgagcttgggatcgaggaggttcattgaaccaagtaaacaagaaataaaggcaatattttgaaaatagaaagtaaaacaaaacaaaaaacacaactttttcggtgatttagaacaaatatcaaatcaaaccaaccacaaagcaaaagaaacctcgtccaatgctaccccaagcatcttccgattaagaaccgaggtcaagtcatgaaagtccatatatcccatgcccgttcgccaaaaatgcaatgattagaaaaacgaaacagatcggaacaacaagggcagcttcacatgcacagaacacatcaccatgcacgtctctgcccagatcgaactgtaaaaaagataagaaaaaaaagcaaggaagtcatcaagaggccaaccacaaagacaaaaacaaaagcaaaagcaaaagcaagagtctcaaaccatccagtccagcccattagcctcttcttctacggggaacacttcacgcgcatactcttccatgtcgcgccagccctgccacagatgtcgagactcgtccgtcacccggagcgagatgacaccgccaggtccttgcatcatgcccgcgccggcgccctttccacccgcgggtccaagacccttcggcgagcccgcggcgggccgtgagaacccgggcnnnnnnnnnnnnnnnnnnnnnnnnnnnnnnnnnnnnnnnnnnnnnnnnnnnnnnnnnnnnnnnnnnnnnnnnnnnnnnnnnnnnnnnnnnnnnnnnnnnnnnnnnnnnnnnnnnnnnnnnnnnnnnnnnnnnnnnnnnnnnnnnnnnnnnnnnnnnnnnnnnnnnnnnnnnnnnnnnnnnnnnnnnnccggggtcgggccgtgagaactcgggctgcgggaagtacggcgcatcgcatcggccaaacagctcctccagcgcctcgagctgttctcgatatcccggcgggatgttaaccttgatctcgatcttgggcacgcggacgtactggcatgggcggtccagggcgcgcgagaacgccgcgcacacctgtaacggggagagggtttcgaaagtgagcgcgatcctaggtggcgggttagctttcgttccttgattctttctcctaggacggtgtctggaaatccgtcccgggtgatgattcccgcactcaccgatggccgttccatttcttcgggccgtccttgaaaatctgcagcagcgtcggaccaacgtcatgctcggcgtccagccacggcaacgggatttccggatcgaacggcgcacgccactcgaagctcccgtctggcagcagctccatctggaagagcgggtatggcaggctcgtgaagttgttattgtagatgccggcgtagacaaaggtggagggcattccgagctggcggatgtagttctcgacggtgaacttgggcgcccactgcgggacggcgggccagggaccatgcacggaatgatccggcatactgctgtagatgtagtgctggattgtgccggcgcgtttggcggcgtctgccaggtcgtggccgatggcgacctcgtcgccggactgggaggtggtgttgatgaaggcgagctgggcgcctttgaagagctcgtccatcagggcggtgttgccgagcagcgggccttgcaggagcgtcacattgggtagttgttggagttctggggcgatgacgcctttcagggaatgtatttgcgcgcgcacggaataccccacggcggacgcgacacggatcagcgaggccgcttgccggcctgtcgcgttgaccacggcaatggtcttctgcggttgtgtcatccgggttgatcgggggggtggaggaccttggtggggggagtatagagggagaggtatagagaaagaagaaggttatcaaaaaggacaagaggacagaggacagataaaagaagagaaatccggagtaggccttggcgagaagggctttgcgatggtggggtagaagttgggaaagttgtatgtaacaagaatcgtgatcggacctaaattatgcgattggaacagtcaaggtcaggagttctccaaattgtccttctgatctgcaattaataaaataataaaaagaaggaaaagacgcaaaggacgcaaaattgccccaaaaaatggcattcgacttccgaaaacgcggagagccagaaaggataagataagaattctttttctacgcgcaccgtcctctattccctgccacgctgcatatcaaatccctttttccggctctgcgtgctatatccaaatataaccaattcccccccatttgcgcatccccgagggagaaaaaaaaagaaaaaaaaaacccacagtgcggtctcgtccaccggtttttacgtaaatcggcaccacacctgggcattttcggcagcacgggaagatcctgattcgggaacttgagtcggttgggagtgtatgatgtgaggtatgtggtatgtcaagtacttttctctatacctatactatgacactataacatcataacgcaccatacccctatgccgatcgacagaactatacaacatacaacatacaacgtacagcacagcatctatacatcacgccaagccttgaatcgaacccatagcggaaccactcccgagggaaatcaaactagcacgtagactaaatcacgcaggtgacttcatagcaccgttcatcgcgaaggacttcctgttccactgtctgccagggacagcctcacgtggtctttatcgtatatctggatgtgggctagggcttgtccaatggcgttggggtcttggcacaggttgacgtgctacactcatgtccgacttgccattccacccgatacgtccaggtaacaaggtacttacggagtgccacggagtactacggagtacggagtaccttttggcacaatagctgggagattacgtctgaatttacgtctgaatttacgagcctgatatgtatcttccctgcctgaacatcacatcattccctgcggcatgagactattttcgagatccatgaggcaatcaatttagtacaacatactccatactctatattatcttgcacgatgtgggtataaaaacacgcaaaagggggaaaaagcaaaaaaacatgcagacagccccctccataaaagagaacccagttggagtaaccccccgactagaacacttctatacaatctagaacattcagctatatccaccttagcagttagcaggcacacccctgtacggagcacggagcacggagtactaacgacactaacagcaaaccccagaaaaccgaaaatgaaaaggagagaaaaaaaaaatagggagagtccttatcttccccacttagtggcttctatccccggctacggcaggggacgatctccgcggatgaaattccgtattctagtctggtgatggtgccacagctaaaagaaggcaatagaagtaggacagggggggttttttcttctttgcgattctggcgtgatcggaatggagtgcgactataacaaaatggtgtcagaataagcccgaggttactctatggtgttctattattctatacacaatgtcataccctatattatctattctataccacgatgtcatcatcgccgacgcaaagcgcaggcattcaactaccaaattgaccggttgaagagggaaaattcccacaaaagaagacgcacctgcaggcttaccggaggccaatgccccttaaaaaaaagagagacatcatatcaaccgaagtataggtaagccatcccacataaagcaagggagcatacgacacaacagtaccccaatcccaaccccaacccctgaacctagcctgaacctagcctgaacctaccctatgacgaaatcctaacctaaggcgccgacccaggaatcatccgattcttaccagcatcccactcccactcctcctccatctcccgctggctgatctctttcggcccaaccccagccatgccccagacaaacggccggtgacgcgccatgagctcggcggctggtcgctcgtccgaatgcaggtgcgcgccggatttgcgcaggaggagcgtgtgctccgagaggcccgcgctcgcggccaggaagagcggggtgtggccggcgcgattgcggaggtgcaccgagccgccttgcgataggaggaggtgcaggattttgattgacggggatgtggctgctaggtgctgcgttgggttagtgtcgagataaggatacggggcgagggagataagggagggggaaacggtgagacgcttacgatgggcgtgttgccggaatagtcggcgtcgttcaggagccagtggtgttctctcttggtaatggcttggaccttctctaggtcgccctgggcaatggcgtatcccagcgatgtgagtgtctggatgcggtcggagagttcgccgtccgggtgtcggaagataggtaatgttgactcggtgagctcgccgcggatggatactgacatgtttttggcgacggattccggggtggattctggcagcgcgaggagatacgcgagcttcgtcaatgcgccctcggttgtcatgtcgaggccggctacgacgcctgctcgagagagactcatgcctgtggcgtagactggactgacgctgcccgtaagaccttaagatatgtcagtcatcctgattggcgtgaagcgttgggcacaactcacattgcgtgatattcacaataacaataccccgctggatagcactagccaagacgttgatcatagcgttatcctgccccgagggcgcattgcccgcgccaaaagtctccagaatcagcccgcgcaagccatccagcttgagcaccgcatccaccatctccggcttgataccagggaagatccgcagacaagcaacatgcgtagtatccagattcgtgcgaatactaaacggctccaaactcgtaggccgatgcaccatatcccagttcacattagtccgcatagaattcgtaaccgccacgggggcacaattcggcgaatcaaacgcagcgaaatcactcgccgcaaccttcgtcgtccgattcccgcggaacaaccgattattaaaatacaaacacacctcggggatcataaaatggcccgcgacaaccaacgacccgagcaggttatccgtcgcgtcattctgcagctcgagcatcggcgcctgcgacccagtaagcacaaccggtttcccaagattctgcagcatgaagctgagcgccgagcacgtgtacgccagactgtccgtgccatgcagcacaacgaacccgtcgaagagcttgtaattgcgctcgatcgcctcggcgatttgagtccagcccttcgcgtcgatcgagctgctgtcgagcagttcctcgaactcgaagaccgtgtaccgcacctggcgcccgtaggctgtcatcggtgtgcgcaggcttgggcgtgctttgagttcgtgcgcggcgttcgcgactacgttcattgttgtgctggcggagccgtcgttgaaggtcggcactcgcgccatgcatttttcttggaacccccgtgctgggatgaagccgcctggtgagggttgcatgcagattgtcccgccggtcatgatgattaggacgcgcgactcgtgggaggtctcttcggctttggcggggtccagcgttggtgtgagcgtcattttgatggtttctgtgctgagctgagggttcaggctggtagatatcatggcgaggtcagtttctgattcttgtggtttgtatcgcttggcccgtgacctgcgattgcggtcgtaattttaacgataatccaaggtcaattgatatgaatcaaggcattgatccgttcattcgccgtctgcagtgcgccacgatcaggtgaatagaattttcattaatcggagacaacgttgaaatgaaagttaaaacgttaaagtcactcaaccgcgtagatcaacgattgactcttttggcgaagaagtgaccccaattgaaccccaactcgaattacgtacagcgattttcattggtcggttctagtttaagactttgtccccactctcagcgatctcggagtacatacgtattggccgagtctgatgatttagatattctatgtatcttgaaggtctttagaataagaaacaaagcagcactagtccatgggtgatcgcggataggttaacggtacgaactcaaattatgtagttcaacgctttactctacgaatcctgagtggaatatgaagacaatgactccgtagtggagctatagacgtcattcggaagcatcgagacaagcaacgcaaagcacattggctatttccctttccacgacttctctctgtttcaaccgttttgtgtattctattgccgttaccatttgcgtcggtaatgcaaatccacgatcacagggcctagctggcataagaagtactgtaccggatagtttactatgaggtgaggacaaaaagtgtgaaataatcgatcatctcagaactagacatatgcccccattatttcccttttatcatttcctcctccgtttctctactctccacttctctcaaaaagttcgcctcgttccaaatcacccggggagtttttgctgaaacaagatgtgagcaaaatttccgtagcttacaaagcccggcgaaatcggatttcgtcttcaatgacaccatccacgaatttggtattaaacaaagcataaagcgagagtccttcattgcctcgatttttccaagttgcggttcacaatcaaaagtggtctcgtcgtcgcggaagactgcccaaactgactcatagtagcttaaaagcctccctcgatgaatgtgccagcaaaggtcagattttgggcacacggcttctagaaaagggcaaatggaattcaacgtcggcatcgaaaagcctggaatagttagtaacaatatataatgtgggaaaggatcaataacaactgaccatctgggcgatgggcgatgggggattttcagcatgattaactctaacaattcctcctctttatcgagagactgccagagtgcgtcatcaacagaagttccaggatttgattctataaagtaagaacggatatctcgagaggcggctctagacgcttgttagccctggtataagatatctagtcttctttcttaccgatcctggatatcctttaggacacattcaagttcaccatttgataaacgacttaaaggccgaggtcttcggcgatttacccgaaaaggctgtcttccagagaacgtgtacgacgcggagaagtcatatagaactgtatcgtaaatgtcatcgggaagtcgaaaatgtatatctccatgggttatcccaatccgatgcagagcatctaggcgacgaagtcggtctttcagtaaagaataataccactcctgttcaaatggacttagagacatcatctcaggagtagtccaaggcgtttgtgtaaggatcgtcgcgaagcttttagatagttggtcgatatcttcactaagaacacttcgagagcacaattccggtcttaatgcctctagcacaaccgctcgctcgtggcaatatccaaaggagaatcgagattttgacatattgataaccaccgcatggaattgtgggaaatatattctttcacgggtggaacagaataggtcaatatggttcgagggagttgctccgccgccaattcgtacgaattaaccggcaagattccaaagttttcgatgaacacgtcgagaacttgatttccaatctccgctctgaaactgagcgttcacggtgaagacgtgaaccgtttccgccccgaaagatggctgggtccagagtccagagctagatggtgttggctgggtgtttatgcctttccacggagggccaaggatatgtctaggcagtaagtgatttagggtatgagagcagtacgtagaacttacgctgactgaattggcggaggaatttgcactgacggaagcttcgcatgcaatcatacgaatcattcagacattccccgagcttagattaccatctgatacacctagtgttccacctggtgaggaaaagcaagctttgacgattgtggtgatgagtgcggaaggatgtaaggttttgttggactgaaacatgtacattagacgataggttcatgttagccagatttacaactagaatatgaggacctctgagtgcaaacgcatacactgagctaaaatatttgtattaaggctatactccaccgaggcaaaattcgctacccggaactttctccgctattctcgtaggggacccaggggcaccccattcatgggcttggccaatctgggcgttggtccaacacgaatattcgttcagcatggcatcggaaacattggcaatgtccgatgcatcctctagcggttcgcgagagtaacggattgcccgtccacactggtcgaaccatagcgcaagaacagttcctgcgtcgaagccttcggaagcaagggttattgcatcaacgatatggcgggcagtggaatagtttagttggatacgtcttaaatgaagactacgaggaagaaatccatagcatctcacatatatagggcagtattctggaacaattaagcctaatagtaagcgtgatatagcctgaaatactccgtagtcattcgctagtctcaccccggattaaactgcgacaaatcctcctccaaaagccccatcatgtactgattcccccagaaccaattccccaattgcgcagcagtccccgaatcctgtccctgcacttgagatggatcgagcgccgagaaaccacccccgttctgctcggatatatccgccgagctgacatgcataccgggattatctgtctggaaatatccctgagagtttcccatctggaaggcaccactgtttgggggattcatagggtttgtaggcgctagtccgagagcactgaggtacacatcgaattcctgaccgacctcaatgagatcctggtcttggtctgccgctgtctgggtccgtgtgttagcttcgtagtaaaggcgggcgacggtgccgagcactgagcatagggtgtgtaatcggtcgacggattgagagaaggtgcttagcggttggagggaggcgatgaactcttcgagtcgggcgaggtcgtcgccgttggactttgttattatgttgcagaatatcacgatgaaggggacgaagggggataggaggatgcccctatattagttttgtgagaatttggtctgagagtgtatagccattgcagagacagcgctggttgggatcatgagtgcttaccagtgcatgtaggagattttcatgaaatcgtctgtttcgttgagcgctgcaacgcactgtcggtggatttccagggcttcccgggctgtctcgatgcattccggtatgaaggtggcaacagaccccggatctgtggatgctggaattgctcggtagatcaaagtcatgatagccagccgacttactttgtcagttgcaaggtacatgaggtcgatctcggatattttaagatcggaggccatgaatttctacatgtttcacgttagcaactcgactcaatcaaatccacaaatagcaggaaggtatacctcaaacggctccatgaccttcgactgcatctcagcggctaatctatgtgcatgtgtgactcgttcactttctggtttctgcagcgcctctgggctgtacaaatattggtaaacctcactttggatgattgccgacctagtccaccatatacagacaggcccccatggataaggaacatctgcgctctcatcgagcggcggtaggctgatgtcgtagttctgaatggacgacgcacgtcctagacgcagggacatcatattcaaaattgtgtagaccgaccagaatagatgttgcttttggcgttggactgatatgggatcgtgctccattgaagtaatgcgatgatatcccagtgtctggcacagattcatggccgttgatgctagcgtccaggcaactgatggcttagaaatctcgagtgcatgcatagcctgtattggtaagtaaggagtctacatgggttatatccgaaaaggacaaaatggaaagggtgactaacgcctagggccaacgccatgatcgactcatggcttgcaggcatcaggatgttcaaattggcaagcgctgtctctaggttgtcgcgacacatctcaatgcagtgccggtgctcctctcgcgaactggcgtctctctccatgccgccatattcgtagagagcgctgtacaaacaaaagttggttacaacaaatgccgcatcggagtaatcgtctatgcagaagtagacttcacggcatttttcagtgaaatatttcacactgagaaaggggacatagccaccaaagaaggccggtggtgtttctggatgagtaagaataggaagctggagacgtgtctttggaataaaccgcaccttgaacttttctcaatatgtctagaaccaatggtagaggcggcatctccagatcacggatgtcgcgtttcacacctaacctcgcattcttagtaggaagttgactcccctgcgagtctgcttctcgccgttggttttggattccaacaagctgcttcagcgacgagagagccgcgctgatcttcggactggacaaaacctgcggcgagcttttggacacggcagattcaagaaacgcgctagcgtaggccccatgggcagtcagcgatgagctgccctcaaacccagagctgtggtcatgctgctcgatagtaggattcgctagatacagaggacccttaggctttgccgggttcgatgtagcgaatgacggctgcgaaggggttgacttctgaggcgaaggtgcgaaatgagactcgcgcgagtttagccctgtggagccttgtagttgagatgtattttttgctagctgttgaagagtactttcaatgcttgccaggcgttcctcgatcaaatcaatctttttctcactgtggtcgagtcaatggttgtcctatgataggagaaaatgctcatactattgatttgagattaaaacccgccgtcggggctctggtggcttctggcctctgccagtagatcggcatacaatgctggagctgcgacagttggaacatggcgtgcgcttatcgcatcggatctgtgacggcgtgagatcgaatcatgatatcgtgccactagagttgcagctgcatacctttcgcagacggcattgatcacactgcatgcatcattaatatttgattagccaaagccgtatctttcctttctttttctaagcttgcaactgcttagttgtggagcaacacctaccgcacgtcggaccagcgcgcttggcacatcctgtccctcatgatcggattcctcgggctccatgaattttcagacactgcgtatctagccttgaagtgtaacatagaaattgctagaattagagacgaatgaagcttcaaattgcgagcccgggcttggttgccttggccaccggtacgatcacgtggtaggacttttattgagatgcgataccagagacatatatgaatatattaaattttgaggttaatcggcagatatgagcgaacataatatgtgatatcttcatttaacgtgaccagtcatgaacgagagtgacccagcaagcgccgtgcctgttctattactttaatgggcacagcgcgtccagcacacatgaaccaaagtgtataatcaatctatcttgcaaagtgtggtgggatataagcgcgaaaacaacctcggtgtccaatgcagatctatttcttgggaggcgcagggggccaccacgcgccatcgctcagccagactcctgtcggactgtaggatccagcctcggaccctctcaaaaacgcgaatcggaaaaataggtcttctggttcatcatcagggtcactatcagccaaaagaaccgatctaggttcaatgttagtgtccaaatcacgattgactagacgaggatttgtttgtagctccaggccatcatggccatggcgatgccaggtgaattccccgcgcttgtcttcgtcgagatagccgcgccagcgctctacatcattgagaagaagggagacgccgtcgaccgctaggtcggccatgcgatcatgttcccacagagagaatgtgatgttaccattgccgcgataagtgtgattcgaatccaactctggaagggagacattcacggatgtggccgtgatattaggataggtagcaccccaccagccatggattccatctccaagtggcgcttgctctcctagggctgccggagtctcgataattgaggcgaagccccaccgcgcaactccattgatgaaaagacccagcagcagaccctggtagacaagcgagggccgggtgggaaaggcggtgccgggcatgaggagaatggcgaggatataatggtgaattcgaaggcgaagcccaggaaggggaagcaaaatcaagatgatgacacccatggtaccgtatatcttcaaataccgtgggagcagacctccctggcgaatttgccacgcctggcttaggataatcgaaatcacaattgggatgacgagagccaatgccaactttgcccccggttgtttctgaatgtccattggagttagacgctgcaatggaatcaatcgcgcaaaggtatagttgttcagggctccagtgaacagtggaggtaggaaaaggaacaactttgacaactggtagataggcgaggatatcggctgcaacagcggcgcagcacagaacttgtaaagtacgtagacaacaaacgacgctggcagcagtcgtgacagaagactggagacaaggtcggccaagaaaggatacgagggcggatctccaacaagtcccgtatggcagaacaccatgaagaatgtactgaaaaacagcacaggcggtgaagtacagaagagccacaggatgccaactgctgcagcagtgattccaagaagcgtccagcgtggatcggaggggcagctagcttgtggcgaggatagctggagaaagctgaaagccttcgggaatgtcgatgggaacccggcagagagaataccgtgttgcttgactgatgggaaagagtgcgctgcgccttcaagcttgacgacaccgcatccgccatcgttggagattgcaccgacatggattgctgcctggcagataaagctatccgcacggtaaagtgccgggtcggagccatccggcccaggccctccaatgactaggccttggtagttgtacgtattatttcccacaacgtaaggctccagtaatttggtatcacggcagttcgcaggacaccggaagggaatagttgatgaagaaaatggacggcagtcgtttccgttaataccacatccattgtcgacctccctaagcaatcaaatacatgttagcggattttatacctagatggcgcttccatttccgcacgtaccagaagttcgtcgagcaggacagcgtctgaggccgaccgtaaccttcgatataaccggaagaacgcgagtgtaataaaaccaaaaaccaaggcaagaaccaagataaatagagcagcaataagagtaaagtcttaaatttgcgctttgggaagaaatggtcaaggtattggactggaagttcctggaatcgcggaaacagaggtttcaacagaagcatatgcgggggatcgggacccttgacccaattgacggtggcgcgaccgacctttcggagcggtagcggcacccatccccagcgaaacgacttggatgattcttgcaaccagacgggaagagtgctgcctgcctcaacgtccggcggcggcaggtcttcggaagcttcgggatcgttcagacgctcgtcatcctcaagcagcggaggaacatatagcctggcggcttgctctcggccctctccaaacatggcgaagcgttggcttggagagtgtggtgtatttgaagaaactagaatgaacgcaacgagcgattgggtataaggttgccagtggctgaagggcgctagcggtgcgataggcagtggggatctccgttaattgatatgtaaggcggaatatcaccagggacgtggccctgaagcgaatagagcgagctaaccgtgttagacctataacatgaagagataggcgatataaatacaaaaaagacaaaggtatgggaagaaggacagacgagatccaagatgagatctggggaagagacagcgaaggcggatcccatcaggcggccaaggcagccaggcagccaatcaggtcgacccgtgtgatggtgtccacaggtggcaacacgatctctccgccgacaacaatctatcttggggtgatcttcagttcggagaaatttgcaaaatattgcactaatgcagggaaaatcttcggatgtgatctgagcttttgaaactatatcgtcgttccaccgtgctgtccgtcctacactgtgtgacaacaaggccagggatcacagccctggtactgaacgagggaaaagacatgattggttgagttcctagggctttctgagaaattgaagacctcggttccatctgaactggtacacttgcgtatacgggctactactcttgggcagtatccacgtatccactccatcgtcgccattctgacgttgccactgccaaaatagtatccatgggaacaccacgtggaagccacctggatgtacaagcttactcgcgtgggaagagcctgactctgacggtagcagatagaaccggcagaagaaatatggtacatatagctacttatggaagtaggtaggtattccctggcttttcccttcttcttgttcttttctttttcttttcttggttttttgtcttgttgttaacttatcttgttgtcttgtcgacttggcgataatttggtaccttgttgaggagcaaggattttgttaatacgccgcaagggtatccaggtgtcaatatggagaagcccttcgaatggtggtcggttgagcgttgatgtcagaaggtggtgtaagtgtttattttccagagtcagggtcttgattccctttgttgtattgctccaagttgtaaacagtaaagtcgggtttgaatcttgatgcacatttcatatcttgcagcagcctcgttatgctcatttccgtgcatttcagatatttcagttgccagtggttgagagtataagaggaagtcggatttgcgtgaggtcatgatgtcaaagtagcaaagcaaagcaagattgaagagactgaaaagacacacaagtcatgcgaggtatgttaggaatgccctgcttggttggaaagtacccttaagctcaatgagaagagcaagaaggccttgtgatgagagtcacatggtgacagcgggttggcaatgtatgaggctctgcatgtataaaactctagctaactgctatagacattgaagactgtgagcccatatatctaaaacagtcagccccatgaggtgacaatggtgaaggtcgattggaaatatagatggaaggagtaagggtgtaaaaggatactcacgcccttggattgacgccaggcccaaaagcgtctggaggttcaacacactagatagataaatgataatcattttagtggactcaattccatggtgttttagttgagctatatggcatatgccaccactcggtacggagtacggggtagtgaactgtgatttacgttgaaatatcaagcaaagccaagaaaaactatcaccgagcccaggattcgaacctagatcgcctggggtcctaatacggaaaaagaacgccaagaagtggcagtccatagttatcgaaataggtgcctgaatgcctgaattaactgtggggtcagccatggactctcacaaataattaaaacctcaccccgcacgagcctcaagctctgcaaccggcatgatgcctctagtttccgaaaacgaagagcttgccgaagaaatcgaagccgtaaacgccatctacgatcccggaacagtaaccgtaacgcgcacgaccccggcaaatgcgacaaccaacacacttgacctagggagtcccgcgcactccaataacaacatctataccacagtggtcaccctccaaatcccagaacaaccccacctgtcctttatcctcggcttcgaagcctcatacccagactcccgacccgccgtactgggaacagcatcaacagccgcacgcggggaaggcaagatcgccatcgatgtattggaggagatcgtacaacggacctggcaggccggcgctgtgtgtctattcgatgtaatcagcgaagccgtcgatatattcccggaattgagtatcggacaggacgatgtcggggactcgtctactcagacaccaactgtcgacgcgtcgtcgaccgccacagaggcctttggagctctgtccctgcgcgacgccttcggcctcgatgccccgcccgaatggatcctctcggatgtggtctccgagaagaaatcggtgttcgtgggccgtgtagcccgtgttactagtctagcgcaggcgcaggcttttcttgatcatcttacggctacggatcggaaggttgcggccgcgtcgcataatattagtgcttggcgtattcggcacaggaaggatggggatggcgagggtggggagactgttgttcaggattatgatgatgatggggagactgctgctggggcccggttgttacatgttatgcagttgatggatgtgtggaatgtcgtggttgttgtttcgcgatggtatggaggcattcaacttggtccggcgcggttccggctcattaatgatgctggtcgtgatgctttggttaagggtgggtttactaaggagcgagaggaggctgcggctgcggagaaaggaaagaagaagggcaagaaatgaggggactggtgatctccctggtgatttttgatgctctggactccggagacccccaaattgaattcatttatatggggattctggcccgcctaaggcggacatgatgaaacacccgggtccgcatagccagggtgcttgatgcaacctcgaacaggcagcaaccgcactgcaactgcggatacaactttcctccttggaaagtgtctaagactttatgtcttatcctaagactgggatttacgacaatggcaaattagtggtgcgtggcccgtcatgcgacactgtctacgaagtactgacaacaggtaatgctgacagatgatccaagacacagtctagcatacgatgaaagattttgccaactggatccagacaaagtcaggccagtgcaatgagccattcagggccacaacctttgatgtctgttccgggaaaagcagcaggcgtagaacgaaccaatcacgagccgtaatatcattgagatttttgcatccaccactactacatacatagcaactttcgtccgaagtgctggctagcggttctttgcctaggaaatcgccttctcatggtgcttgccggactgacatagttgatagttgtttcgcccgatgctccgcgattcctcacgttattaacccttcatcccgagacgctttgtatgtattcatgagatcttcacatcttccatcgttgctgcaggctgcaatctggtctcacgcaagaccagccatgccgcgacaaaactgggacttttcgcctgaggctggctgtgagtatggaaagctgcgcctctcgcataccattgctataaaagattgtagatatcctaaacgggtaaaactgcttacaacagtgggtataattcaaccggccggagccgggtggtggaccctgactatgttggaagagcaattttaagcgattcgcaaacgagaaatccactgccatgaagccaaggaaggcttggccaaagtcaaccagcggagccgaaggatcgacagaagcattcaggaaacagcaacgaggccatttccatgcaactgccagttagttagcggtgatgactaccctctgggcactgtgcctagatagcgctgcaatcccgctggcaacaaaacacgttgccaagccttggcaggggcggccccgcttctaacggggaactcttgggccctgtgctgagatttcccaccttataatattgtatgccggcaaggattgagggtctcacatgttctttcattcatgccagtatgtgattgactctgtgtactagcgcatagcccctatttttgtgtgtcttgttttcgattaccaaattcaatccttctccgcatcgtctagaagaatccacgggttgtcccgcacccttgcgcgtgctcatgatctcagatgggtaaactggacccgtgcggacccctgctttgcatacgagtttttcggtgccctccgcaacgagagtcggtggctagtgagctgggtcctgacctggcagagttgcgaagaaaacatcctctcggcgctgatatggtcagcaacatgtccacttcggcaacctggttcactattcgtaattctgcccccaaggtggatctcgttgctgctacagccaacaagacatgtccagggcaatatggcgtggcaatcaatatgactgacaaaactgtggaggtcccacgtgggtcaattggtctggcggtgactacaccaatgacacatgcgcagtggtggtgtccacaccgaatcccacgctggatccttgtcgcgtcgaaattgacaagactattgtcgcaagtatagaggcctctttgaaaactcgcttatgcgccgattgcctaaggatgacaagaatgccgcgcaacaaatggctgtggctggcgtatcctgcgtgctggctgcatttggggccttagttttccttcttccgtgaccatattcctgcgttagtcctttgatacccgatgtcctactcttgctacaaggctgtccctttcagccttggccgtagcaggctcctaatggaaaagtagatgccagacatctcgtagtacaagatcggtttggctgccgggttgacattctcttcgcctctaactctcgcgtagcaactgaatcgagcttgcgagttggaagccacgcccataattaggcgctcgcgaacgacttggtcaatgtgacacgtcggtagcacaccgtgtttggcaacatcgatatcaggtctttagtagccacgtaggtagaacatgaaacctccttcacatgtaaatcggcatacgaacggttagttccgggtttcatgcccgatttcaaggatataccgactgtaagcgcttaaacagaaatacaacctcacgggaaaagagccgaaagtgatatgcggatggtttgattgcgatagatcagaggtttaactagttaattaattagaaatagttaagaattactaataagaattaaggagtcacatttaaggaatagtggggtttgcaatatattaggtcaacatatatcacgggaataccgaggtagacgataagattaacagacaagctacaacgctgaaatgaagctcaaccctttaggatttcatttcctagatcatgaaagtccatatattctacgctataggctaggcagccagtattgtttgaaattttagggagcgctaactcggcgatttccactggcttctatattggttctacggagtagccgagttgagactaagtgcatttggtggagctgcgtgatcctacttttaactgctccgtaatacttttaaaattagtgagatctctggagatcttgccaagattgacacattcacattgctaaactaaaggggaaagacaaagttccggtgttagatagattggaaggctgaagagacgatggcttgggttacattgtcccactgcgtcattaagggcttgaagagcactactccggtgaagatgaaacacacccgtcaacgttggcaacagaagaacagcgccaatagggagttcatttgccagcggttttgatggtgcgacgaatccaggggcttgtctgtgcggtggttggctcttctccagccgcccggcttagtcccagcgggtatcagcgagaagtctctctcgtcttcctactggtcgtctttttagttttcgactaggaatcagctttgcactgcaacctctgaacttcagtggacaaaatgaggggggaaataggagtctgaaacatccaccccttggccttccccactatctccgtgatgtctctgcactttcagacgtgtcgggttagccactcagaggctgggattggggatcttcgagaggcttgcagggcccgagagacccatgtctgtatatataattgacgccaacgccatccctctttttttcctttgcctttacctccattctcttcttacttcgatcaattcggcattcaggctagacctgtgtcactttccttctttccatcgatttttgcctgtggcaaaacatcatacattcctttttgaagcccatctttgagacaatacaaagacgccctattgttcatcaacaaagaacccgggaaacacttccgatacattgaatcagtgtgtttgtttcattcactctgatacaaaggtattgtctctcctgcctttgtttcatcgttgcctcagatctatatacgtctgatctattgtgggaaatctatcatctattgaaggggacatctatatgccttgcctacaatagacaataggcatagacctatcaatgagacactgtcgatatatatacccccaagcccatcatgttctctgttcaagtctctcattccatgctaacatcctactacaagatccattcctttctgacatctgattccattcgtctggcacgaatcgatcccatttgcaacatttgtctatccaaaatctcaaaccccaaaaatttcaatcagccaagatgtttatcacctccaactacatcgctgccctgatgggcgcttccatggtcaacgcccacatgatcatgagcgtccccgtcccttatagcaaggacagtctcaacaactcgcctctggcagcagatggcagtgacttcccatgcaagcttcgcgataacgccttcgaggctcccgagaccgagaccatcatcgcaatcggcgagtcgcaccctctgtccttcatcggcagcgccacccacggcggtggttcctgccagatcagtctgaccaccgacctgcaaccctccaagacctccgagtggaaagtcatcaagtccttcgagggtggctgccctgccaatgttgatggcaacatgtctggcggcgccgacgtcgtcgatccctactctttcaacttcaccattcccgacggaatctccgctggcaaatacactctcgcctggacctggttcaaccgcatcggtaaccgcgagatgtacatgaactgcgccccaatcactgtctcgggtggctcctccaagcgctcccctgaggaattcgagaaacgcgctgctagtttcccgcccatgttcgtcgcaaacgtcaatggctgcaccaccccggagagtgtcgatatccgcttcccccagccaggtgacgatatcgagtatgacggtgaacccgctaaccttgccgcggagggctccgaggcttgcaccggtaccgctaccttcggcggctccgctatcactgcttcttcgagctcctctagctctggctcggaatctggctccagctcatccgtcgcttcctccagctctacttccgcccccgcagagagcgcctccaccgcagccaccacggtatccgccgccccagtcccagaagctacttcttcgagtgcacccgttgaccccgagcccgtggcctcctcaacaactgccgcagctcccgcgacatcctcttcgtcctctggatccacctccggtgccctgacgggtagctgcagtaccgagggtgagtggaactgcatttcaggcacctccttccagcgctgtgcttctggcacctggtccgctgctcagcagatggcgaccggcacggcttgcaacgctggtcagagcgaggagcttgttatcagcgctagtaagaaggcgcgtcatctctccagcatgcgcttccgtaatcgcgcgttcggtgttcaccatgcccactctatctaatctagttagatatggaaacagtccgctagtttcggatacacttcgtccccatcacgaatggtttttttgattcttgtctcttattgctctttcatttcttctgggctggtcctttcgcttttcggtgcattgtatgttcctttcttcctgtacattaagagatgagaccaggaaaataggacatctcaaaggtttcgacataaagatatccttgtacactgtgttgatcgatgttgtagcatatgtaaaagtctagggtttgtattgtcagcagtctgtagagcttattgctcaaataatagtgttgtttgtcaatgtccattgggaagcttgatgatagacaaagtcagctgcagaaataccactgcccacgagtttagtgggtcttgacaagtttctagatgtagaatcaaattgtagagacagacagtcacatcttcagcatgtttgcctctactttgagtaacggaacttgcttgacttcaatgttgaggatcgcacctgccagatatggatagacccacttgtggatccacgtgatagctcagattagctaattgctatatatcaacgctagtccacaaatggcaggaagggcttagggtttgccgccccaccgcattttctcactaagcgaaaaaatccacaccgagttgtgaagccccccgactcagacagattggatcttcaacctcacctcgacaccgaccagcaacaatggcctctcgcccgactgtctcgatcgccacggctgcgggcaagccctccggggcctcccacccccttcccactgtgttctctgctcctatccgcccggatattgtccagtatggctcgccaaaatcttgaagcatttacaaatcaatggaggggaagtgctgaccgtcgctctacaggcatgttcacactggtatggccaagaacaagcgccagccctacgccgtgagcgagaaggctggtgaacagacctccgctgagtcctggggtaccggtacgttattggcacatttttcgagattggaaggattggatcgaaatttgcgaaaatttcgcgatcgtcaaattcttctctattgagagcaataactgacagaattgcttttcatcgaataggtcgtgctgttgcccgtatcccccgtgtctccggtggtggtactcaccgtgccggtcaggctgccttcggtaaccagtgccgttccggtcgtatgttcgcccctaccaaggtctggcgcaagtggcaccagaaggtcaacgttggccagcggtatgtggaatccaattcgacgaatcgaacgcctagagaatggaggaactaatgaacccgcgcctacagtcgtttcgctaccgcctccgctctggctgcttctgcttcccccgctctgctcttcgcccgcggtcaccgtgtcgccaacgtcccggaggttcccctcgtcgttgagtccaaggctgttgagtccctgaacaagaccaaggccgccatcgccctcctccaggctgtcggtgccggacccgatctcgtcaaggtccagaagtcccgcaagatgcgcgccggtaagggtaagctccgtaaccgtcgcttccgccagcgccgcggacccctcgttgtctacaaccccgagaccgacggcaaggacctcgtcaaggccttccgcaacatccccggtgtcgagacctcgcccgtcttctccctcaacctcctccagctcgcccccggtggccacctcggtcgcttcgtcatctggacctcctcggccttccaggctctcgaccaggtctacggcaccaccaccagcccctcggctctcaagcgggattacctcctgccctccaacctggtggctaacgctgacctgacccgcctcatcaactcctccgaaattcagtccgttctgaaggcccccaagggcgaggcccgcaccaagcgtgtcaacgtccagaagaagaacccccttcgcaacaagcaggtcatgctccgcctcaacccctacgccgctgcctactccaagcagaagcttggacagcagtccgtcgatggtggcaagcctactgctcctgccgcggctttcctcaacactctccacgaggattaagcgggtctttatttgcccctgctcttttctttgttaactgtgtttcgttggcaaaaccgtagtcagcaaaaatgaatcaatgccttttttgcaatacccatgggtctatttggagtagtaatgtgatcggttttccgtgttcttctaagaccctcgaattttttgtatcgtgcatggtaagtgtagatgtaatatggtcgaggttctgtctaagatcatcgtttatatggaggtgaatgtcaacccttccgctgattacaacctgactctgatcgagcatgatgactgcctttttcaaagctcaatatgaagaactagatctcgttcttttccacggtcagtataaccttactgactagcagccagacacttctcctttcctctccttttcaattacttccagcttctatccagtgaaacagattacttgtctcttgtagattaccggtcgctcgttcgacatccttatatcgtgaccggcaactcacttggctatccttggtggtttgcaacgtactcgccatgaattcaggtgtctagtttcatacgaaacaacagacgagaggcccattatttctttgtcgtagaaccaattaacacctcttaaataagaggaaatttcatatatatctgtacattgacatgactattttccattattgtcagaaaatatgattattggaataaattattttcaacatctaagtatatagacggaggtgcatataaaagtcaatacgtccagagtaaccatggatagagatgcggctccttttccgcaaaacttcttaaagtacaattataccgagggattcagaatatctcaattgagactggacaaatactcgaacataattgacaatgtctcaacccacagcgggaaatatcacatgccaacaagtttccttacagcccacttagtaccggtataaagtataaacccgatgcaagcacggaaactatcccaattaattcatgcagataagccggcaagtcaagtgaaacatacatcatgacttgctgagttagcgcgagtggttcgataaaaagcagcttgtaagatattgattggtgtcgtggttattgagtttcggcatttgcagaggatagatagcaatccaaagaaaaagccagcattactgaaacacgggatataaataagcattccaatgtcttatttcggcagcttcacatgtcactgcttgtaatctaattgacttttcgtctgccccgttggttccttggaaatagataggttttaggcatatatacggagttccgtatagcgccgggacgtgaacaatggtataaagaataaagtttgtgttcccttctatgcacgtttctatcattttcggagttgcgtgcaccttgaaagttggtcctgcaacaaatatctacgaaccctctactccgtacggagtacaacttacggagtacaacaacaacatactccgcagggcacggatcaagctcgggaaatcccaatgtcaatgccgatgatcacctaagcggaatacctttttggatgtcgggcacggagatcagggacgtgccggggtagatgccaaggaaaccttcaggccccagggtccgcaggtgatacataactagtcgcttgcgagtccgggatcttacgtcagttaaagagctttttttagtcctgcatgttgatgctattgtttttactgtttgagagatcactatgtttaaggctgtatgttgatagttagagggtctgaagtctctgctgtatacggagtatatatacagcctttcaggaatccatggatacatacaacatagttatgcaagagtctgggatagacatgtattctagtaaagccgcccaatcccctcagtcaaatatgcaacactaatcaggaacatatagccgagagatcctgaacgccccaagccgtgcgatcggagggaaaaatctccgatccgaagaaacaaagagaaaaaatatataaaaatataaaaaagaaacgaaacgaaaacgtgtaaagagcgctctcggtaagatcaaccgacggataacctgcacgagcaaggagaaaaatctaccttgtgggtaaataaacgcccgggtctcgtgctggtctctattcgcagatcacaaagcgggtgcttgtctaagtataggcatgtctcacttgagcagctaacacaaatcagttcaggggtgcagagcgtgttggcgctatcaagagtcaatcagacactagctccgtgcaaaacatgttgcagtagtaatgttgcaatacattagtgtctaggaggaatgaacacggtaggtttatactcctccgtatagaattgagaagtgtttctaattatttagcttatttctttgttccgacggcaaactccgtagaactgttcacaaagtaactagaatacataactagctgaataaaccgaataaactcagttacttcatgtggatcattgtacaggttgtctctagtcgctccctatacaaccgatttcattggacttctacgcggattaatcctccgcccaacccaaaaatttggagtctcggtatttgctcggagaaactagatgccgtaaaaggaggctactccgtataggaagctgacatctctaaactgccgagtcttagaggattaacggcggaatcccgatgtcccgggtaactcgcgtcatttcacgggcctttcctagaacagaaaacgcacactccaggggctgagaccgtaccagacgatcccgaaggcttgcagatctgatcgccagaaattgagactgacaacgtattacgtggtcaattccagagttgcatcgccgttggactaggatgtcgagtggacacttggaagactagggttccctgttgaataaagaatgtggtaattgtacgggcatttcctataaaacactacataatctgctcgtaagaaaaaaatctgcatagatacccatcctgggtagttcgctccgaagaattagaatcctgagccacaaaataacctctttaactatagagtactccgtatattagttccaatttggaaacttcgggtgcacaacagccactccacttgcggacctgcttgcggaccaagtcgattctcaccatatccaaacgtaagataagccctgcggccccgacactgggaggagattttcccgtctaggcatcgaatcgcccaagccaccatccgaccgaagcccaagggacccactgtgagggtattcgcggtattatccgagtccaagcttactgcgctttttccccttataatttagtccctgctctgcaaattctaggtttgggcgtatataaatcttaccgagtatacatacataccgatgtgcttctttgtctacctgggtggatgcccgtatccatacccttgtgcatgtatcttgcacatgctggttccaaaccccgaaattctcccttgtgcgcgtctcatttaaatgcttactagggcatgaaattggtcatgcttagaagtacttgcagagtgggtatgcaaggccttggcgcctaaaaggctagaatgtatggagtacgaatatgtaatgtagcatccttgatccctgtggaggattcgccattaatataaggatgcggcagtaaagcggatgatattcggggagatttccacatttcccctatgtttttcctataatttcccagatatggagtatctagtactcttcccccacttgagagaatcaatggtctataattgtcgttcacgatcccgccgcttctatgtgatatgccaagtttgaacacccaatgccgatgtcatatacccactttcaataatgatcctttagaaatctctccaattatcttcattgggctctctagactaaccttctaagagacattgtagcgccctattcctaatgtggcatctttggagccgcctaaaccgaaagggctgtaactgtctcatttcaatttcgttttgacgtggagaaggctgtagattgagttatattccgagcagctaaatctgatttatattaagtaaaggtgaccgttagtacttttggtaattttgatgtactcggaatacttgcaatacttagaatactctctcttctttggctctttttcgagttccatacctgaattcccctcctttctcatctttgtccattttgacactttcgttctattcgagcctcgatttctttaggccatttcgttcctttttctgggatccttgctataatcctctgaagaaagaattgcttgatcctgcaggaggggaaggctgaggctcgacatcgggaaaggttgacttgcagagaacgtcaaatccatttccactcttagtggaatctacgaggcgctactcctagtggtcttttcccctgtcagggtgccactaactagtgggagacgcttcgaggctattttgtcccataagctgtgtgccaccatcggccaccatcgaacgttccggttatcgtctttgctatcgtgtcatattgcttccttttttgtccatcgcacatctatttgggatttgggtattgaagacgctttcggcgctattctctccaatatccttggtggtatacccacccgttgccgccactaatccttagctcttcgaggatctgtaaccgagatctcgctgccatctgatctcccccgctccaccacatcctagcattcaggagtgatctactgggtttcaagcgggtttccattgttgctaatatcccggcccggttctccgtgatcctgtaactttatagacgctcgtgtcaatcctggcaaatccctggacgttggcacaaactaccgggatactgcagacaccctggcacgaaaaccatgcacctgagaccgtgactgctcgggactaatgcgagatggtggccttttaagctagcttcaatttccttccctgtcgcagattggtgtgggtggactatttcgagcgccaatattcccatcaacacccgctggaatcctttgtacaaattcctctccctcatcttcgcttcgagcttggaatgtacacgatcaatccatctcgctttgctgccacctgatccaaatttgtccgacactccactcaattctatcactgtaccttgaatatcgaaaattaaattggtacgtgaaaagcgcctacgtcccgatagagagagagctattgctaagtcgcctggatcctttcaatagatacccctttctgggacctgaacaatccaacagaaagccgaaattcagccgaagacgatctcgttgactcgttccagaccaagtcctttccttgaaaccatccgcatttaaggacacaaagccaccgagcacatcatcacactggttgttgtctgggtctgttatgtagatggtcaattgtgtaaatcactctgaccccacatatcattcgccatgccaacctcccaaggatcaagaggatctggctccggttctgccataggcccacgttgctacgttggacccttcggtcgtatgttacccatagatggcccatcctcggagcagcaacccgagcttccagctaatttacaagaaaccggggaacacctataccagcttccacccccgcgggtaccgactagtttacaatttggatctgatccctttccacggcagaaaaacagtcccgagcgcaaagacagtggatcagagtcccagaagccggagcaacttccctccgtgaggcagatactcactccaacaccggggacaaattcattgcaatactctcaaccatttgcaagttcgacactcaacacaggacgtcgtggatctgcataccctcactatcacgatccgactttccaggttccatcatctgcacctgatagaggccgtgctgaatctcttccgcaactgcacggtctgccttcattgtcacaagtgggtctgcagggccacagaggcataagaagccagacaccgacaagaagtgatccacccgctgcatcttttatacagctaccttttcacacatcctcgcatggtcaaataccaaatggggaactatcatcaccggaaagttcaaagcggtcaaataaccagccccttcgccctcatgtggtagacgagcgagtcatcgacggggaactttgcttcgtatatgcagacggatcgtcctgtcccaaattcatcgacggtacacccgtcaacgcaaattgggggataacgaaggccggcaggccgagaaaacgccttggacttgcctgcttgacttgccgcgagaagaagatcaagtgtaatcctaacccaaccgccgaggccgtatgtgatcaatgccggaaatctggacgggaatgcaggttcgaaagtgcgtaagtgcgatcgtaatctctgagaatatgcgtccacggacttacctcgttgaaccattgctgatccctcaaagcccgcggggtagccgtcctcccatgagaggcccatctggcagacccgactcttacgcccccaccagccacggggctttggacgtttctccgtcactttacgacatcactcgagcctcggacagtgcgacctcccttcctggaactaccggccactcaccgatgccagagagctcgatgaagacgccgtcatcccaagaagccacttatgaaacgatgaccgaggcggacagaggcttgagatcccgatcctaccaatttccatcgcccttatccggtacagatgaaactcttggacgaccatcgccacatgccgagtctgttcgttctcctgaatactctgacattctggggaaactcaaggacagcaattcggacgacccactcgcggcgtcctggaacctggacccgtacgaaagcgacccagagtccgtggctcactacactgagtgttatttctcgcacgtgaatgacggtatgtgccacatgttcccgcgtggacgattcagctcgtggttgaaaacctgccccatcaagtctgcacacgacaagatgctcctttattctatgatggctcttggatctgtgttctccgacaggccagaaaaaatggcagctatgacgcgatattctcgcatagcacgatttgctatcaatagaagccagcataccctttctttgcaactcgcccagagccatatcataatgagtctctggtactacgctacggggtcgctggtcggatcttgggactcgataggcgcagcgggaagagcggtctttgggcttcgctacaatgtggaatctggcggcgttgttgtagaccacagccaagtttgtgaatacgggttacatccacaggccttgattgagtgccgaagacgaactttctggattgcctttgtgcttgatgtaagaaatcgcgcatcccccgatcaggaactcaatcctagttactgacaactactaccagcgcttctcgagcctctattccgcttcgtcgactttcatctcgtcggatgcagccctgctgaggcttccgtgccgagaagaaatatacgagactcagcagtacgcgacagtcccatatttccaatcatttctcaatcacaccgcagcctccacaggcgatgaccgctctaccctaagcccaatggcttttttaatcgagatcatggctatttggggggacatctcgctccatataacccggctaccacacatccctctcgaagcgtacaaccgacttgccgaagaattcaacaccaccatcgtccaaaaatccaaccaatggatgacccgactccccgaatacctggcattctcgcccacaaacctagaacgaagcatccatcaaaaaaatgcagacaccttcatttcaacccatttgttctaccacgtcagtttgatgaaactgtacagacacgcccgctaccagagcctccaacccgaaatccttagccaatacattcaccgcgctcgataccacgcggtcgaaatcctccgcatttctcttaccttcgaccagtgcgccaaaaaacttacaccttctcgaaacaacacagagacatccatatccaaattaacgcccctgaaccccttcctcggctatgtgatcctatcagctgtggatgtcctcagctccgctggtctggcgtctcagttgcatgagtgcatctattatattagaggtgcgctagatgccgtccacgaactcggccgttactgggacagctcgttgcaactagtcaccgttctccacagacgcctgagtctgatgatgacctgcctgaatgagcgcagcgtcttcgctgagaaacagggttttgctcttgatggcccgccgctcgagacgaaggtccatgctggcgctttgcattcccatccgccttcgacaacgggcgatgatctttttactggttctatgcctagagaaatgattttgaatgctctgcggcttgatgagacacttatctcggagagtcgtattacttggattagagatccatgagaggattttcccctctcggctctatttccctcctcctgttggcctcctctttggtcgggctccggaattggtgtgacggcgtgattgatctcctcgatatttttgcagtggtaagggatcttgttttctcttatcctgttacgatgtgatggatgcatttcaataatgatggtgacttcgctgattgatttgaaagtatcgttgctatgtatagatggaactgtgacctacatgacctgactttgccttttatttgtatattatagtatgtcatttaatttctgctttctttgagcgagcgctctgctactcctcatgtaccttatatcttttgggagacaggagaagcttaattgaagccaatgggataaatgaaagagtgatttactaatgtttcactattttattacaaaatcatatagaatgctatgctgctatgatactgtagttggaaactgccctgaataaataaacctgtcttcaacaagatccatcaacaccgcgtaatgagtatcttcattaacaattgggttcgagcaaagccacccaagcactgtcccaagagtaaccaacacttcagactcaggatcttccttcatatttcgtttccactccagatgaattgacggggaagagtagcatcctttaagacgttgctagcagatatcttcaatgtaccaaccgttttcgcaattatctatcaaaagagacatttccacccatctatctaagtaatatgaaccgcgagacacatgagatctacttgtatatgcaatactgatagtactcatactaattaatgtccacgggtggtcacatcactccaattgccctaagccaataggaatggagtctcgggttggcacccgagaacaaagccattgtattcaaatagtcaccgggtcgatgtttcatattctataaactcgacatttgaaaccaatatgggattatctacttgataatgagctaactaaaatagatctgcagtatatcatttcccccagtcaatgctccaccataacacctccgagcggggattccaacggagatgcggaaggtttctccggaatttcgatttccctcctcaccttgtttcattgccctatcgcatttcatccaaccaccccaaaatgaggatatatatatagatatcaaaaaaaccgagtgcgtgaaaagctctcatgtcctctttcaagcagcccgggacgcacgagttccccggcgcggagttccgcacgacggtggaagatgacggactcgacgccgactatagcatgatcggcgactacccagaggaacccgactattatgtccagctgggccttgcgcgcaatccgcccccaacagacgccgagatccgctccgcctaccgcaacttaaccctcagcttccaccccgacaagcagccgccgcatctccgccatgcggccgagagtcagttcagacatatccaggaagcgtatgagaccctcattgatccaaataagcgcattgtgtatgatatatcgggtgcagcgggcgtgcggcaggaatggggtcagcgcggagtcatggggattggtggggaggcccaacggctggatgttggtgttaaggcgatgtcgccggatcagttccggcgctggtttttgaagacgatgaaaaaacgggagcggaaagccgtcgagagtttggtttccagcaaggtatgcaatttctatattgatcttccttgggaagttgcgcgaatgtgctgttgctgacatccattgggcttggtttagggcggtattaccctgggaatcaacgcggcatctatgatttccgtcgacgaggacgacgatgtgcagttccatataccttcaccgaaagtgacatcatatggtgtttcgtatagtttcaagacgccggtgtcattaccacagctttggggcacggcagagaatgaggaagacacctcgggtgtggaaccggattcaggggaagatgtgccagacgaggaacaagagcacatgcatgtgatttggaatgcaggtgtaactggaggtttggctcgcccgatcaagaaagtcgctgttgagtaccaggatgggacagaaggagaagaaagggtatgatgtgctgcatgttcgcatctcgaaatttcgctaaacatttttcagatcgaaatgccaccgctcctggcaagtcagaatttccaatttggggccactgtgactcccaatatccaaaccctggtaggcaccaagggaatctgggccaaacatcctttctctctcctcaaggattcccaaatcagcttcaatgctcttcttctccctgccccaaccttgaaagcaagcatcgcccgggctttccagccaatccccggcaccaagccgttccaggtcagcgtgaccagtatacatacgcgctctttgggggaaacggcgccttcttttgagattcaagtctccagagaagttgccaaacagaagatcggcaccatgacatggaacagtggtgtcgttcagtggcccgaatttcttctcagccagttcccatcaatcggaatgggagctcagagtgccattgcatctgctaatgaggtcagtaacctgcagttcggtctaatctcgctccccaagcagggccaagctgcaatcgatttcgacgacgacgacgaggagagtggagaaatggacgaggatgtccgtcatctgctcaagaaaaaacgccaaatcgaccaatctgccgaggcatggcagacctatcttcaggtcactcccggcggaggcgcttttgtcttgagttattctcgaaacctcttctccgggaaacccgctgatgatccggtcaagactgaatggagctctgaagggtacttcccgatgccgagcatggaccaggcccgtgctgtgcgactcgagatctcgagtgttcttgggttagacatgactctcaattggaccattaagggtgttcgccgggttggcgagtatacgcgtgttgggctcggtattggcatcgcagacaagggtatcatgatgacagtttcatggcatcgactcggtcagaatattaatattccgattattgtttgcccggctagtgaggcaacaagcggagccgcagcgctgaccgctatattcccttggctggcctactgcgcgattgagtttggctatattcgcccacgcgatagaaaactccgtcggcaggcagctgctaaacgccaccgtgagctcaagaagttgatccctaagaaacgtgaagagagtctccaggccatcgagctcatgaccgatcaagtgcaaaggcgccaagcgcgagaggaagcacaagacggtctggtcattcagaaggcagagtatggttatataccgccagtaaacaagaaacccaaaaatgggttcgcggagcctcgggtgattgatgtcacgatccctgtggctgcgctagttaaccggggtcaactggtgattcccggaaaaaccatcaaggtaagtcaggcgatagccttgaattggtcaatcttctttagagcggacactaatttgaatggatctagttccaaattttgggattccatgaccctgcgccattgctgcccaaacgattgaagatctggtatagattccaggggcgcgatcattttgtcgaggcaggtgataaagaggacatcgcatgccccatgcgtacgcactttatatccgaatgagtataattagactcatcaaaaggtcgaagaacccctaccatgtaatttataacatccagtcgttcattagcgacttattatttcaacctccattctgatgcttttactcccctttgtgtttttactaaatagttgctccgctgctcagctgctataatgcagggttgtcataatttgaagcctttctccctataattatcctaataatatcagtctcttgtacaaataacgtgagtcgtgacctcggaaattgttgctcaacgtcggaaagtcttggcataatttgatacggcactccataaagaccagccgtgcaattcgtcccgaaaagccaaatggagcgtcaccccgtgatatcttctcatcaaccacgagtgcacagctcttgagttgcttactcttgaaatgtcgacctctatcgctgcagggcttttcaagtccctccccaaaccgaaatattctggcgaggaggaggagttgccacagcatgcgcaacctcgtggcccgcgcgtggtgggcgccgaccagattgatgaaacacaggtggtcctacgagtgagttgtggatcattctatcgacataccagtacaataactaattgattctatctttcagaggactggacccccgccctacggaaaccgtgcaggatggcgacctcgcgcccccgaagatttcggggacggcggcgcgttccccgagattctagttgcacagtatcccctcgacatgggccgaaagggaaagtcgtccaagtcaaatgcgcttgctcttcaggtcgatgccgaaggtaaggtcaagtacgacgcgattgcccgccgcggacacgccgacaaccgcaccgtccatgcctcattcaaggatttgatcccgctccgacagcgggtggatatgggggagatttccctggaaaagccatctgaggaggagatccaggctcaaatggagaggactaaggctgcgcttacaactttggtcgaaggagcttcgtcggcgcagaagccgaagaacgtcaagggcggacaacgagctgagccgacttttgttcgatacaccccggccaaccagatgggcaacaccggccgccagaatgaccgcattatgaagattgtcgagaggcagctggatcctatggaaccgcccaagtttaagcacaagaagattccccgtggcccgccctccccgccgcctcccgttatgcactcgccgcctcggaagcttactgcggaggaccaagaagcatggaagattcctccgcctgtgtcaaactggaagaaccccaagggttacaccgtgcccttggacaagcgtttggctgcagatggtcgcgggctgcaggatgtctccatcaacgacaagttcgcgcagttcgcggaggctttgttcacggcagatcgacatgcgcgtgaagaggtgcagctccgagctcagatgcagcagaagttggcagagaaggagaaggcacagaaggaggagcatcttcggatgttagcacaaaaggctcgtgaggatcgcgctggtcctagtgctcgcgtgtcacgggctcgttcccgctctcgaagtgctagccgcagcgtatctgtatactcctccaggtctgctaccccaagcgaagatgacgaagccgcccgagaccgcgcagagcagcgccgtgagcgacgacgcgaagatgaacgacagctgcgccagtctcgcatgggcacggagcgccgcattcaaaccatggcccgagaacaaaaccgtgatatctccgaaaaggtcgcgcttggtctggccaagcctacacagagctctgagtccatgtgggattcgcgtttgttcaaccggaccagtggcatgcaatctggtttcaatgaagataacccttacgacaagccgctgttcgccgcgcaggacgccatcaacagcatttatcgtccacgtgcccaagctgatgccgatgacgaagatgcaggcgaaggcgagatgagcaagcttgagaagaccaagcgattcgaggtcttgggtcgcgccaaggaaggattccgtggcgctgctgaagccgaggtaagcttctatcccatatgcatttcttttcgtcgctaataagttattctataggagcgccaaggtcccgttcaattcgagaaggacactgccgatccatttggtattgacaatatgattgccgacgtgacttcgggtcagaagcgttatggaattcaggaagctgaagatgtcgaccgcaagtcaaaacgcccgagggtcgacgacgaatgaatccgctttgtttaatctttcttccatgtgtctctatgttctctccttgtctctatgcaggcatcggaaaaatatccccaatgcattgcgggcgtttctggcagtgtaatctttaccattatcttgttcacaaagggaaatcgaatcaagcgagtcacttgggctcgcttgcatgatatgggatatgccgtctcatttacagctacaataaaaatatgttggtctacatcttggaattaccagtagtatgttgtattgctagtgaatgtgtagattgagacagctttcgcacaggtacgatgaaagatgtgggtcgagggaatgtggttggataactagctacatccacataggcaaaggagactgagggttgtattccgtgggaccgtcaatggctatggagtccgtatactcagccatgactttctcagagagctcgcacgagaactggactttgatctggtataacctgcatagacctcaacaacttggtaatgttgatatccttgtaggtaaagtaccctgtcctccgcctgcgctgtctcatggggctacggagagatggcggtcgagagggatggggaaaggagagaagaagagaagaggagaaaggtgggaggagcccttttataccccaaacccacgtgtcttcccaaactttgtggccattgtgtttgcctggctgccccaggctcctcagtagatagcactatgtcttctaggtgtacacaatacagatacgtgtatgattcttgcctctgtttcgtcgcattgataacggaccaggcacaagatggctgcgactctttaaagctttgtaccctcaaggccatgtacctcatgtaccccaggtggaattgaattcacgcaagtaatattaacattatgctggtctaaagcagcccggaggcagcgtactatattgacacagcacccactcagttcttcacctccttcttattaggagatagcacactctccaaccacttgtaagccacaggcagactatcagggtatcccatgtgcactcggttctcgaacaacctagcttccttaggaccgccatgcttgagaggctccatgcagtcttcaatcgggacaacgccgtcatccacgccctagaaacatatcagctttgttttctttctcgagacggctgaacaggaatacatacgttgagcataagcaaccggcaattatcctggtcaagaataccagtctccacaagcgagaacttcttctgagcgttcttcacaaactcctcctcgttgtcatagccatacttctccgccatagcggaagtaagcctacatcatgattagtattccaccacataaaaccaaaacccagtcagaactcacacaaacggatactcatgatcatttgccttagccaaccactcagggctaaaaacaaagtgcgatccaggtccatgagcaacagccccggcaagacgcgcacggtgtgtacaagccgcgcggatagcatagaagccacccgcactaagcccccacgccgcgacacgcgacatgtcaaactccggccgccgatccatgtaatccagcacgctggaccagagcctatcgggcgactcagggtcagcgggatctgcaggcgagtccgccgtcccgggaatctcaacgataaccgtcgcccagccacggttgatgatctcgtgggagcgctggctgttgtcaggcctatacccgtcaagcccggtcatgagcagcacgacggggacgcgattggtggggctcgcttcctccggcacccggatgtacagcgggatcgaggcgccgtcgcggcccgcgcggtgcgtgtgtgaaatcacttcctccgtgatgatgggtttccatagtgaggcggctttcaggtacacctgcttctgacggtcgaaggcggcgcgcttgacagatgtctcggggcgtgttgatgggcttacgtaggggaagcgcgagatgcggaggatgactgctgcgcggcggtacaggtctgcggcgcggtcgagatggccgttgttgagggctgtgtcggcttcattctcgagggctgttgctgttgggaggaaggcttcggtataggcgtctgtgtttgcgtcgttgatgttatcctgttgttgttagtcgtgggtttgggttgtattcaaatgtttgacgatgctcacagcgatcagcttttggaaaataggctcgaagtcttccacggatccatcgtggaatgggtagatggatttagtggcctggtcaattatccgtgttagttccctgtgtgttttctgattgttgggaagagacatacgcagaatttccactttgactcccataggaccttgatcgatccctgatgagggtagacagtgtcgaacttgtctccgaggatccaattcaccattttgagcgggatatagacgaggtagattgatgggtttcgtactgcttatggcttttcgttgatgaactgcaaatttgaggcatcttgagcttttttcattgacttgccaccaactgtattcgccggtagcagtcattaccaagcaagccaaggcagaatgatgtctatcgagatgcaaacagtaggtgtatttgccgcaagccgtagatgagaccggatcggcagagatctgatgaggttgcttcgaagacttccggatgcggggaggtgacagccaagatgacgagggtaaggaatgtagatcagatcgtactctcagatgtctcattactcaaaatcccgctgtcaatttctcttcgcggcttttcatggcatttctgtcggcttcatcattatctagccttaggtaaagtgaaatgaacttttgtactcaaatggtagaatagtttcattctgattctatggaaaacaacatagaaacatatatctaaacaagagcaacgtatgattcagatggtaattggccctgatcctatacatggcctcaaatacaaaacatatatccgacatctccaattcaatatggcaaccccacgagacatcgattagatgttggctccaccgttacaaggcaaaatttgacctgcaaataattagcaagattcccaggggtgaatttaacattccagtactaaccgttgatccattctccagcaggactggccaagaatgccacaatgcggccaatatccgcaggcacaccacagcgtccaaggggactaccattagcaagcgccgtctcaatatcctcgatagacgagttctggtcacagccaggcgcatagcgccacgcgttggtcaaccacatatcactcttgacaccagcaggagcaatcgcgttaacagtagccctcttcttgccaaagtcagcagcaaagcagcgagtaaagccctccacagcgctcttgctgcccgcatacagcgagtggccgggcacacccaggcccgcggcaatagacgacatcagcacgacacgcccgccgggctggatatagtcgtaggcattcttcgcgacgaagaactgcgcccgagtgttgaggtcgaacactgcgttgaagtcctccagtgtagtctcggacaacggcacgaacttctccgttccggcgttcgacacaacaatgtccagctgtccgaagtgggacactacctggcggaagaggttggcgatagagtcgacgtttgtcaggtcggcttggaatgcggcgccgtggacaccttgcgcttggatatcttgtaccactgcgtcggcggtctttgagctgctggcgtagttgatcgctacgcttgctcccttcttggctagctctagcgcgatgccggctccgatgcctcgaccaccgccggtcactaaggcgactttgccggcgagctcgggctgggcagcgttggggtttgcaacgaccattttggcggttattttgatgttggagggtgtggaggattgtagatgactgggtgtggaatcgtgttgagagagggaaccctaatctaatattgaacctgttagtaacaccaggatcttggctggagtcagctggatggcttggttccatcattcatacctattgcagagctgggctttgtttccgaatttgtcggtgacctattacagtgccagtcattagggcccacagccaacatcaggtcctaaaacagagtagctgtttgcgaacaaggaccttgtaccgcatgcggaagtccacgaggggctgtctccaccatctgtcacattagaatccctcggttgcattgttgtgtttccgtgcatgggaaatatgctggccagatccggggaatgttggcatcaggggaatttgtggcaagtgaataatcacacggcgcgcctcgcagctataaccacatctcgaactatctgcagaaatcaaagattgccgaacaaccatgtctcctgccgtaaagaacatcaccgctgagcccaacttggacatcagcttccagggtatgtttcaatccaccctcattcacctgcttgtgctaacagcaacagactacctcatcctctcaaagctcgtcttcgactgggcggacagctacgatgccaaggtacacttccaatcgcattaaaagtgaattcaacattaatcctgacactatcccaggactgggaccgcctgcgcagcatcattgctccaactctgacggtggactacaccaagatcggtctgagaagatgggacaacatgtccgctgacgaatacatggccatgatcacccatcccggcttcctcggtgacaaaaccatcaagacccagcatctgcttggtcagacatggtgggagaagatctccgacaccgaggttattggtcaccaccagcttcgcgcggcgcaccaggtctacgaaaccgaagagttggagactgtcaagcttcgtggtcactctcatgctacgaatgagcactactatctcaagatcgatggtatctggaaatttgccgggttgaagccgaatgtgcgctttgatgagttacgctttgacgaggttttcaagggccttgactagatgtcaatgggcttttgcgaagggaaactggtacaactctatatagtataagaatttattttacttggtttccattttctgtgaaattgttgaacttatggtaactagagaaatcgcgagacttctctatgcctgaaaaacaaggcctctatttgaggattctgggtttccccactgcaatatgctatatttagccacaaggtacgacaacatcatctctccaaatctcagtccgaaatagacaaatcacagtgatcatagccatcatcgctcactgatagatacaccttcttctctgccagtctagccttctcttctgtttcaatatacccccgcacttctttgagggcacaattcaccagtgaagtcaaatcttcatcattcggatgttgccgacgaatctcttcgaaaacttcgataccgtcaggagggttgtaatcttgaggtccacgctgattaaaggcgaggacttgcaccgcattaaccgcgattgcagtggctttgagtatcttcgctctgtcattttcggtatagacgttggaagggccgaagctcatcaagagcttagcaattggatatgatgtggtcaatagcatccaaatagatatattctgatcgacagattctgtcaacttgcgtagatcatggagcaaatgcgttttgagaatatcggcttcagtggcaagggagaccttgttgagtggcatcgtatttctcgcccggtcaatcaagtcaaggacaaattggccagcaggcatattcgccaatgaagcgatattctccattccatacttagcatccgtactaaatgggctttgtgtgtggtctgtttctgcagatggctttgtgtttggttctcccgcgacgttggtcggttcattcattactgtcgacgaggaagcgtcaccacggccatactgatcgggaaacctggtattggagctcacgcatgcttgtggagattgggttggcgattcgacacttctttcagataatttaatccgaaagtccgcgcaatgagccctacattggtaatatgacggtctttgaggataatcaggcttgaactcgtagcacattcttcagggacatactcacgtaatacccatggtgccccgagaaattcccgatcgttctcagcaaactcaccccagctggtcggtacaaagagccgggttaatctaggatacctttgagttacttggacgcaaaacgggacattgagtcctaggttgtcgtctttggtttgcggtctctttcctgattttgcccagtagatgaagattccgagtcggtaatctccatcttcgaaatccctaggtctgacattatcgcaacagaatgcatgggaagccattgttttgggtggaggagatgagagtggacccgacgagctggagagatgtgcagatcgatactggcagtttaggtaccgttgatctgttgagttgatcataatgtttcattccttgctgtatacttttagaagacccaatacacaagtttggtttaggggagaaggatccagggtacacttaaccttctgtatatcaatctctagtcactgtgtagacttcgggagtcaaaatcagcaatataattcagatgtgtcctcgcacgtgtagaggtaaaacaggcaagagcccaccttgggggtgccttcctgatcaggtgccttcccatttggtcaaaaatcgtcaccaacccaattccctcatttaccttaagccattggggaggtataaataccccctccccccccccattttctctcttcttctttctttcttcttcaacactccgggtccacattgcaaatcgcgggtcgcgtgacatgggttctgtctcccgttgatcttgatggcctcaacatccagtcatcaacatccatcatgaccttgcatcgtccttcatggttaccgtccttcatggtcactgtccttcatggtctcaacattcacagtcatcaacatccatcatgaccttgcattatctatcatgatcatcgtccacagtcatcaacatccatcatgaccttgcatcgtccttcatggttaccgtccttcatggtcactgtccttcatggtctcaacattcacagtcatcaacatccatcatgaccttgcattatctatcatgatcatcgtccacagtcatcaacatccatcatgaccttgcatcgtccttcatggttaccgtccttcatggtcactgtccttcatggtctcaacattcacagtcatcaacatccatcatgaccttgcattatctatcatgatcatcgtccacagtcatcaacatccatcatgaccttgcatcgtccttcatggttaccgtccttcatggtcactgtccttcatggtctcaacattcacagtcatcaacatccatcatgaccttgcattatctatcatgatcatcgtccacagtcatcaacatccatcatgaccttgcatcgtccttcatggttaccgtccttcatggtcactgtccttcatggtctcaacattcacagtcatcaacatccatcatgaccttgcattatctatcatgatcatcgtccacagtcatcaacatccatcatgaccttgcatcgtccttcatggttaccgtccttcatggtcactgtccttcatggtctcaacattcacagtcatcaacatccatcatgaccttgcattatctatcatggtagaaaaaaaatgggtcacctcgacaagcaagcatcaacattcataccatctcaaccacttcgacaaccatcttgacctttgactaccatcttaaccactttgacaacaactttgacaaccatccactttgactaccatcttgaccactttgacaacaaccctgacaaccatccactttgacaataaccttgacctttgactaccattttgaccactttgacaacaactttgacaaccatccactttgacaaccatccactttgacaaccatccactttnnnnnnnnnnnnnnnnnnnnnnnnnnnnnnnnnnnnnnnnnnnnnnnnnnnnnnnnnnnnnnnnnnnnnnnnnnnnnnnnnnnnnnnnnnnnnnnnnnnnnnnnnnnnnnnnnnnnnnnnnnnnnnnnnnnnnnnnnnnnnnnnnnnnnnnnnnnnnnnnnnnnnnnnnnnnnnnnnnnnnnnnnnnnnnnnnnnnnnnnnnnnnnnnnnnnnnnnnnnnnnnnnnnnnnnnnnnnnnnnnnnnnnnnnnnnnnnnnnnnnnnnnnnnnnnnnnnnnnnnnnnnnnnnnnnnnnnnnnnnnnnnnnnnnnnnnnnnnnnnnnnnnnnnnnnnnnnnnnnnnnnnnnnnnnnnnnnnnnnnnnnnnnnnnnnnnnnnnnnnnnnnnnnnnnnnnnnnnnnnnnnnnnnnnnnnnnnnnnnnnnnnnnnnnnnnnnnnnnnnnnnnnnnnnnnnnnnnnnnnnnnnnnagccaccatccaccatgggcctctcctacaagaaccgtgaccatcatttcgtcatattacagagacacaaaggtttccacggctttccaatcaactcttctctcttttttgtcagcatcaagtcccacggccaacctgcaaagaaggcctgccttgaggaacttcaacttctcggtcaaaccaatatccactacagaccaacccatacaagccagtaactcgtgaaagcttccggatcaagtagtatccactgactaagtcactttcaccaacaaacacgggttgacatccacaaatcagaggttttttatgtctcatatcatcgtccaaagtggttctgtctgtacgaaccaacgtttttatgtcattggaaattagttagaagaagaatcaatttttgctatttcattttattctttctgtagattaatattcactttgtcctaaaccaaatacaaaaggcaagataaaaaggctaagcctctagggatgttgatacaagggtttgtctattgtcttctatgcctatggggctacgaggcctattattttcattttctacaggaacgatactctgtgtgaccatattttgaatattcattccatgacaagtttatccttctctgtctccaacagataacacagattcccatatagcaaaaacatcaactgagaccagacattcaataatcacaacctccacaatctccacaatcttagtcaaacaacaagtaatcgtacccttcatcgcagtcatagttgccatagtcataagaagacagcccagaataataacaaccatggtcctcaatatgcaagtagctctgactcccactgtcttcatcatgggaagtatttcgagtctcaagtcgaagcgaagatgacacaggctggtctttgtcgctgttttggttgatatcttcagtcccatcatcaggagccaccccaggatcttggtcttggtcttctccatcacaatcacaatcagaatccatagacccagtctcaacaataattgaagacggcacatgcttgtcggaaccctcagatccccaactatgtccacaaccatatcctaactcaaatccccactcagagtcgtatccatgatccgagctagcttgttgttcgaacccagattccagcacaggctttggtcttgatgccgaccccggcctcgttccagatccagatgcagatccaggcattttctgcttggctgcattctcaaggtgcttgagcggtttcgctacactatctctccaacgacgcgagctccccgtgctcggttcgtatatattaagatcatagactcgacgatgctcgtggcatcggaggatcttgcgtctgtttcataattaatataaggatatgatatgataaaggggacgctaatggttcaaggattagtcaactcactcgtgaatcttttcgaaattcgcatctgcaatgtcgtatgtggatacttcttcgaaattcccgtctgtatcgcttgggacgaagtactggatggactctatcggtcctcttttggcacgttgtatgagctgcatgcagacgcttgattcggagggatcgatggatcctattgaagtttcgggtgtgctcagggcccattttgtgaattctgtgaaggtttgttcgtgctctgggtttgggagcttttttggttggatggcgctgcagcagaatagatggtttgacattttgacggtttggtttgaatgagtttttatatagatgatggttggtaggagagaggatttatttcgtgggggactctgactataggctgtgtgaagtcgtcaggatgtgctaattccctagtattgctagattaggaaacggagctgttattcccatgtctagacttgcgggtattatcgggatggaaagtactatgccactttcatattttagttttggatatccatggtagaaagtaggaagttggagaggcatgtgaaggtcattcgtataccgaccaaatggctggcattagattaattagtagaaaagaaaatctgatatacaagcattaataacctctaaaaagacgcaatatcatatcacaggtgctggcatcactcccaatccttgatctcagccaggatatcatcatcactgaaaagagttagttgatgagcacatttcggcctttagagtgtactcacttagagtctttgatgggagagctgtgaccgttattaataacatagccgctataggtattctggtttggccacgggcccttggtcgactcctcgtggatagtgatgtggtggtcgtgcggtttgtcggggtgctcgacgtagacatcagtgtgagggactttccagtaaccatctgtgttggcactgggagatggcttcggcaccgatgcttgggacgatccctgaggttgattcgcctcagcgggagcatttgtgcccttggtggcagtatacagagcgccgtgattggtggtgggaggtgtggtgtcaagcccagtcagatcaagaccatttttaccagcagcatttccgctgacgccttgagggtaggcagcgcaggtgtcgtaatggctctgcgggggagcgtgcaagctgtgctggaaggtctcgggggcctcgatgatagtggccatgagaccagtctcgacgtgccactcgacgtggcagtggagcatccagacacctgggttatcggcgcggaagcggatgacggtgtggccgttgttctggaccatgatggtgtcgcgtctgatcggggtgttggagacgttgctcgatagacccgtgtagaagccgccatcaactggggtacgctgcagaacctggaattggtgaccgtgcaagtgccatgggtgcaggttgttgtggtggttgttgatgatgatttcgacgacctcgttgtacttcacgacgaaggggtttacttggccgtatacatcgggattggaggaaaactcgggaccgacggtgttggcagtgtagagcgatggcaccttcggggcgatgtacgtcttgccgttgacagtgaagcgcggaacaccgtctaccagaccggcggcggtatccaaaatgatctggtggtccacgggctgcaggatgggctcatggtcggcaggtaccaataggacatcatccacaaagtccgttgcggcgtcaatgttattgaagacaggaggcggaggtaggggcttggcatcgtcgtacaccaaccaggcggtagcattggggttgtagttctccgggatggtacgattttcgaagatgaacatcatgttgacatccatggtatcccaaatagcaaagttctgactggcatcaggtttggttttaatcaagacactcattcgctgaccagtcgcaacgcgcaggaacttgtctccagccgggtagggctcggtatagacgccgtcgacctccacgacagtcatctcatggccatcgaacacccagaagtggccgggccagtttccaacgcagatgatgtgaaccagatacgtcttgttgggcagaaccttgatcttggtgttggttgagtcgttgatcaatgccgcgtcagggaggggctcttggccatgggaggccgcagtgatcgtaccgagcagctccggcatctccttgtggtaccagtcgctcagagtgagtgtgaattcatcgtcatagtggaaaggagggctagggtcgtggacaatcagagcaccacggaatccatcggggtactggcccgcgttgtgtgagtggtaccagtatgttccagtttggttgacctgtcctgcagttagcatatgttcatcttttccaccgggattacccacatcaaagtgatattgcatgtgtgcgccgggggcaattgggcactgagtgactccaacggcgccatccataactccactgccatgctggcgcatgccgtgccagtggatagccgtggactcgtttccgagacggttgtagacatcgacgatcagttggtcacccaagttcacatcgatctgcgggcagggccattggccattgataccaatgaccgggcgctcaaacccatccggggcagcattcacccaagtaatgtcccatttcaggtaaacgtccttggcggcggctagaccagcccaggtggccagcgcaaacaaactaaacttggccattatggcagtattgaacgagcgaaagacgattggcctgattcaggaggatcgtaaaacccgccaaacgagtgcagtcgaggccgaatcaagaaagcaaaaacgaatgtcgaagaacgcggttgtcgaatgggcgcaagtcggccgctgtgctggatgtcgaccggaagagactggaaatggggcctctttaatcatggcgatagaataacaaagtggtcctgtcgatctgcaggggcctgagtatgctgctgaaatcagatctcatttcgacgttcgcgggggtgtcatgtcattggccgtgccttcattcacgacttgaaggctgggataataaacacgtagtagagcagtatcaggctggaccctgagcttccatttttttcctgttgaagaatgcccttggggggttgggagggtggaatgtagatagttcaccgaaccggaagacggtttctaaccgccacgcaaggggggcatactcgagtcgcactcgtactcgactcaaggcttcgtttagagtaagcatggcacgaaccggaagttctaataatgtatagaacttgcacagcatggattgacacctttgtgacttgacaggtttaatattgtggagtatcatgatgaagaagaatagtcgccgcaaacggattatctatctagttgtagtctcttagtagtctcttatatgttttctctgtagaaatcttctccttcttcacctgtaagctctttctctaaggaaactgcggcaaagggcggaatatgcttgatacggcctttctatgtacaacctttgacgaatcgacgatataagcattagcgagtcatataaaccccgagaataaagataactgggggtttcttattaaattgtaatatacctcacatatagactttcgctggttgatttaagttgaaaataaccttaagtccaacattatcctcagcacaacttaagcaaatcgaatataaagcatccaagtagacgtcaagcaaaaggcgtatgaactcctgacgcgataaggcggaggttcccaatcgggctgtgtgacgttgcagtgaaatctcttctgttagagcggcaaagaaaaaaaaaggtctatggcttcagcgcatttgctatcgtgtatccccggaaaagcgggagattgactggagatgttaccctagacaaatcagatccctgtctggagtcctgcatcccatacatgatcccagaagatctacatcgtattgtctgataggagaacagccgggaaacatcggcgtagaaggccaaggcccacaaaaaacgcccaggcacgagagcgtctccctaattgagaacagtctgataagctgtggagtaaaacgaagagatttagtgttagtcaagcgctggcgataacgtgggaaaaagtgggagggggagaagttgaagaggaggaggggttgccactatcttcacttcttttttcttcagagtctgagtcaaagagaccgtcggccgatctacagtcccaaatcttattctcaatcttgactgccactgacgacatatctggatggcgcttgctcaccccagatagcatcatcgagcctcaatggcgtaatagctggttctttattcaaacatctcttgcttcacaataccctgacctcgtgatatggatcaatcaatcaccctcatcgatgcacaagtgcacttcctagtgagtcattcatattcggcatacaacatctactaacctaatgctaggaggaatgtgtggtgctggtgcacatcccattggagctgtatccttacttcttaaagtctgttctaggactcattttcgatgaagtccctccactggaagacgagacagaccatgcatttgattatgaaaatgcttctgaggatggctcgtacaaaccacctgcattcatgaacgtgtccatcacgccagtggaagtctccgtcatgtgtccaagacgcctgctcgacaaatactttgtccccgtcatggaccaactcgaccagttggatgggtcgctccggtcctgtctgatcgtgagcgagaatgactatatccccatgcaagtgctcggcgaaggcctcgaggccggaaaacgagtcttggaactgaccagtccacttgccctggccggcatgtatgtgaagcctaatatatccatcccctatataaaaaacacccatactaacctccccagatccatcttcttcatctcaacctacttctccgactacatcgtagtcccccagcaaagcaaagcaagcgtgatgtccgctttagagaaaagaggcttccaattcaacgacgcctccgcagccttcatcaccaacccgctcagtcctaccatcgaaagaagactcagcgacctcatcccaccgggcacacccccaccctcaactctaggcgagctccaaacccgcaccttcaacaatctccgcaaacaccaaatcaccccctccgtagacaactccctgcgcctagtccagtgcgccgcccaccacgaataccacagccaagaatcctccatgtccatcctgcgcgacgccctcaccactgtcctcctcgtcgacgaaccccgcttcctctccctaaccctcgcagccctcgaccccgccgcctccctcctcctcgaaaagcgcctcctcccccgcttcgcccgccactccacctccgaaactggattccgcgactacgaagacggctccggcctcctcctcgggtccaaggaagaccacctcatccccatcaccctagacctccgcgacctgcccctcgaagcctcaggtatcgtctgcggcgtggcgggtcgtctcgcagacgcagctaccgtgaatccaagcgccgtcggcggcctcggctccgcgaggacgttcgattcggtcggtactcggctcgcgaacgtctcgctcgataaatcatcccatgcgctccagcccttgccatcctcgacgcaccatctccagcctgatgtggatgtcgccgatgcggtcgagattagtttcttgagtaccgcgcgcgctggtaccattattgttggcgaggatgagcttaggagggcgattgatgcgctcgaggaggagaagatgcagtcgcctaggcttgatggtctttgcttggagtctgagactccgccggatagtccgcagcagggttgagattgcgctttgtggatggcagaggatatgacttatgtgttcatgtgttgatgtggtgtatgggtagtaaaagttcgcttgttttaatatttgtatgaatagctctacttggtcatggattgcttgagtttattggtctgatgtttacttacgtcggtttgagatgaaattgttgtaaaatggtagtcatgtctgacgatatatatctccagagtagcaccatcatatgttcaacccaacagcacagcttaagataaaacgatctcaaattacagaaatagcagaaattgagattattatcttattatttcatatctcattattaatataatagcgctggacagacatacaggtcaaatttctccaacatctctctactatcctcgctgcaggcgaagacttggaccaacgtagtaaatgtctggtggtctgcagatgtacttctaccgatcttcgctctggccttgctcaaaatagccgcatcgcctggattgcaattgagaggtgctcatcaccaagcccattgaagcctcaaattgaacgaaaatggtagagggtagtaaggccgacacagacctgctagtccatatcggattccaccctatcgtcgtttcggcagtggcataatgcggcgcgtacgcggttcgtgatattaacgtcaacatgaggatgactccgagacctgtctgagacaagttcatccgtagaccctgacagtacctaaaccaacagtcagcaagtatcccaacccgccaaacaacacaatccttatcctcaccatcagaacatccagcagcccaatcccctacaccctcattccacgccacacaactaacagccttaaccttctccccaaccggcacagcagcaataacctcccccttaacaacatcccaagcaaacgccgccgcccccgcaaccccctcctcactcccactcagcacgaccgcatcccccatcgcgaaaaccgagcgcacgcgcagctccgcattccgatacgaataccgcggcttcccaatcccaccgaccaccgccttctcgcccccaaacgcattgagcaacttcccatccatgcggtccagcaagcggatatacccgtccagcgtcgacgccagcagcgcgttcccgtcgctcgagcagcgcacgcttgtcaccgggtgcgcgaggacgtcgacggttgtctttcccgtgcggacgtcgtagatccgtgcgtgtccgtcgtagctgccgcttgctattgagtagctcggcatgtgtacgtgtagtgtggagaccgtgtcgctggcttccgtgagcgtttggatgggtttgtagcttgtggaccgggtatcccagaggttgattgttgtgtctgcgctacctggagggagggaggacgttaggttaggatgctaggtgggaagggaagggaagagtgtggggataaggggactcttaccggttactacgacggagtccccatcgccgccaaattgcacggcttcgactcggctgttgtggccgctccagcgtttcgtcgtgatgccttgctctacatcccagaggaagacttggcgatcgcctcctacgctggcgaagcgcgcgttgtcggctgtgacggcgatgtcgaggacggagtagccatgtgcttcgtatttttggattggagtcgtcgtctcgactacggtcgggctattggtattgtttggaacggcgcgcgaaaggtgtactgctcggtctgaggagcctgtgaggacatatgtgccgccggagtttgagaatgttaccgcgttgacggggcctagatgaatgtcagtgtttgtgctttggaggtgatttggttgtaataacccctagacaataagactttaccattgtgtgttttaagagtgtggatatgcctagttgggaatattgtccggggcatggccgttgagttggtggagagaaggaattggagttcaaagaatgcgggagttcagagcttcaactttcaagtctacttaaagagtcctatcggaggggaaaaaactactactttacttcgaacgagctcacaagtattaattctgtcatacggaatacagaagaagttattatcaaagttgtagacacaccatcgctagctaccagcggtaaatggatataacaaacgaaacgaaccaagccaaagaaaggtgcttccaagcgcgaacggcaagacatagggtactcaaaagagaagaaaaaacaagagcatggttcgactactccccttttgaacgatccgggtggaatcccggtaaaattgcaacatcttaacgacgtccgtggctgcgggtgccggaaccctgcaaaccctcgatctcctgctccagggatttgatactggaataagtcagcaatgaattccaccaaacaacgctccggaacatacgctgcatgagtagcctccagatccttgttgaggcggtcgcgctctgagatgagcttctgctcccactggcggaaacgctgctcctcgaccttgacctgctcggtgaagcgcttgcgcagagtctcctcttcctccttgaacttggggttgtcgagcttgcgtggccgggcctcgccaaacttgcgggtctccatctgctgggcgcggtatgcctcgtagtgcgattcttccgttgtgtgaataaggtcgagcatgtgggtgcggatcaagatcgagcggagcttcttgaaatcgcagtgctcctcattctccacctcggcaacaccccaagcgtactgacgacccttgacgacacgaccatcgttggccttgacatccttctcggaaccgatgacggcgaaaggcatggcagccatcaggctgcgggcatgggaagcggcgtgctcgtcgtcctcctccacgggcggggtgtaaatcttgatgccctgggcctcaatcacagcgcggatctaatcaaaggttagtccggattctccccctcgtgcactcgttccactcactctatccttgtagcgcaccagatctgcatggctcagggtatcggccttggcaacgacagggatcaggttgacgcgggagctcagacgtttcatcacctcgatatcgaggggcttcaaggtgtgtccagtggggcggatgaagtacaagcaggcgtgaacacgcatgtcaatcttgtcggttcggcggggctgctgctcctggagcatgtacgactcgtgctggtcatccaggaactcgataatgggttgccatgaatcacggttgttcacgtagtctccgaatccaggggtatcaatgacggtgaggcggactagaaaaggacacctcgtcagctatcgaaacgcggaagtcgtagccctccaacacgagtatctgggtcgcacctttgaagaacttctcctcaagctcagccttggtaatctcaatctccacggttcggtcgacctgcttctggtggcggcgcttgtgatcggcatagttcttaatggtggtggagaagagggtgttgatgaaggttgtctttcccaatcctgactctccggcaacctgatcgaagcttagcatcaacacgggcggatcatttccctccgacggtgggacacaccataatagtgaaggctgcaccccgcttcgcgacaatcttgtgactatacaagcttgattagaacctttcctcgtatccactgtaatcactctcaggtacacaccgctggttggggagctatatcaaagagggcaagttagcttcagcatatcacaagggagacgcgggcgttctgaatagcttacgttggcaatgccaatcggcgtggcggtctctgaggtcgacatggtgggttatagggggattaaaaacaattcggaatcaacacaaaggaagatgaagaagaaggccctggtgtagagtaagacccaaattgagaagagaaaataagtcgactcctgaggagaaaaaaagggagaaggaggaacgaatgtgaaatcggatctctctcgaactgcccgtcgctgcttccccctgaatctcctttcgttttctggagtatacctcaccttgcctatctgggtttagcttgacggactagtaccgattgggtccgggtccgggtcattgatgatccgcgggcccttatcacggtagctggttgaattatctctaattttttgatctgtgagatcgccgacagccaaaatgaagacagacttcaaggtaggtactacgcttggattcttgatcgcatgcaattgccagcaagcctggattattaagatttatactaataccctcaattttagttctccaaccttttggggacggtatatcgcaaaggaaatcttctctttactcccgatggcacatgcttgctttcgccagtaggcaatcgagtctcggtcttcgatctggtacagtatgtgtcgcccgacagtccttcattcggtgatttgaaaccagcccgctcacaattgcttctatagaaatacttcctataccttgcctttttcgcaccgtaccaacatcgaccgtctcgatcttacgcccaagggtaatcttctgttgaccgtggatgaaaatggtcgcgcaattttgaccaacttccaccggcgcatcgccattcaccacttttccttcaaaggacgagtgtccgcactcaagttctccccgtccggtcgacatttcgccgttggcgtgggcagacgcctgcagatctggcagacgccctccaccccgggtaccgaaaccaatggcgagattgaatttgccccgttcgttctacaccgggatcttgctgcccactttgacaacatcgaaagtgtcgaatggtccagcgattcgcgcttcttgctcactgccgccaaggatttgacggcgcgagtatggagcatggatccggaggaaggtttcgagccgactactttggcgggacacagacagggtgtagtggctgcctatttcaatgcgacacaagaagtggtaggtgcttactggaaattggactggaatacatactgattcttatagatctacactgtcagccaagatggcgcactcttccgctgggagtatgtttcaaaaaaagacgaggaaacgaatgaagacatttccgatgcccgatggaggatcgtcaaaaaagatttcttcatgcagaacgacgccaaggtcaactgtgctgcgttccatgcgccgaccaaccttctggtggtagggttctccaatggtttattcgggctctatgaccttccagagttcaacatgatccatcaattgaggtacatcagtctgtgacaccctccctttcacagtggctaatatatcccctctagtgtctcccagagcaatatcgatgttgtgacaattaacaaatcaggcgaatggctagcattcggatcgtctaagcacggtcaattgctggtgtgggaatggcagtccgagtcatatatcctcaaacaacaagggcaccttgattctatgaacgccctcgcatattcaccggacggtcagaggattgtcacggctgccgatgacggtaaaatcaaagtttgggatgtcaagtcaggcttctgtattgttacctttacagaacataccagtggagtgaccgcatgtcagtttgcgaagaagggaagtgtgttgttcacagcgtctttggacggctctatccgtgcatgggatcttattcgctaccgtaacttccgaaccttcacagcaccatcccgactgtcgttctcctcgttggccgtggaccctagtggagaggtgatctgtgctggttcaccagactccttcgacattcacgtatggtccgtgcagaccggtcaattacttgaccagctctccggccacgagggtccggtttccagtcttgcctttgctgccgatggtaaccaccttgtcagtggaagttgggaccatacagttcgcatttggagcatcttcgggcggtcacagaccagtgaacctctgcagctcatgtcagacattctcagtgtggctttccgcccagatgggcaacaagtcgccgcatctaccctagacggtcagctttcattctggtctgttgaagatgctgtacagcaaggaggagttgacggtcgccatgacgtctctggaggacgccgagtggccgaccgccgtactgctgccaatgccgcaggcactaaatccttcaaccgaatcacgtacagcgcagacggtagctgcattctggccggtggcaacagcaagtacatctgcttgtatgatgtcggaacggggtccttgatcaagaagttcaccgtttccgtcaacacctctatcgatggcacccaggagttcctaagcagtcgtgacatgaccgaagctggtccccgtgcgcttattgacgagactggcgaagcgtctgatcacgacgatcgtgttgataccactcttcctggcgcgagacgcggtgatgctggtgcgcgcaccacacgcccagaagtccgcgtgacgtctgtggatttcgcaccgactggacgagcattctgcgccgcctctaccgaaggactccttgtttacagtttggatactgacttcatctttgatccctatgatctggacatcacaatcacaccgtcaagcatccttgccacactagatgctgccaaggaagctgccatatccaatactgtggatgaggaaaataccttcctcaaagctcttatcatggccttccgattgaatgaacaaaagctactccgtgtcgtgtatgaagcgatccctccgtcagatattccccatgtggttcgctccgtgccctccgtctatttacctcgccttctccgatttgtagcacatgccgccgaagaaactcctcatcttgagttcaacctcatgtggattgagtctttgttcagcagccatggtcgctatttcaaggataacacaggcacattcgcaaccgagcttcgtgccgtccagcgtgctgtcgatgacattcgcgagaatctaaaacggttgacggaaaagaacctttacgatctcaactacctgctctctaagcctgttctggggaacaagaaaactagcagtgctttgttggccatggagaccgaggatgctgaggttcctgatgatcagatggtcgatgctgacgagggagaaggtgactgggttggctttgaatgatttctatggggttttcttcgtgtatgtctacttgcatctgagccaggcgttttgtatattggttgcaaagaccaaaaaaggaaatagacagaggtctttgcggccttgtgtgaataatatcctccaagttctgctctctgagacctcaaacggaccctttgtccatctgttcgccttgagcaaacgccgtcccgttttaaaataaaaagtcttaccttctaatactatccgaatgtgtcctgtgccaccctgtctttacccttcttactcttcttaccgccgaacaccttccttaatctctccgcttccaatattccggacaatccaagtctccggagaatcatttatctaagtacctttcctctttctgctgtcaagagcaagatctcatcgtcagccaacctcgatatggccggcctacccttctggcccctcattggggtgttggctgtagtgctctatctccttcgacgaccaccaccttccagtttgagacatatcccaacggtcaagtacaatgcctatctaccagatttcatcaatcgactcatgtactaccccaaagctgcctcgatgatcagtgaaggatatgaaaaggtacgcagcatactgcaaaccacgcgttcacctctattgacatttctgcaatttctagtacaaggatagtccatttcgcctgctcactggcgatggagaagtcatcgtcctgcccgtgaaataccaggatgaactgagacatcttcctccttcgagactcagttctctacatgcccaatatgaagtaccatgagcttattcgtaccacattacgttgagatgctgaagctaatataatattcacagaacgcgttgggccagtacaccaacatcatcatcgacacccttctaccttctatgaccgtgcggaaaaagttgacgcccagtcttggtaccaacatcatttagttctcttattttcagcctcgtgctagagacctaatatatcgaataggtcgcgttgttcccgggatcatcgacgagctgcgaacagcattcgaaactgctctcccaggatgcgaaggtgggaccgaccaaccatgcagatcaacactcggatactgacagagaggtactgaacacagatacctggattcaaattaacccaaacgagatgttcacccgactaatcgccctcgcgacatcccgcatgatggccggcgacgccctccgcgaaaacgaagaatggctcaacgtcgcaagcaactacgccgtgaacgtgggaatcaccattctcctgctccgccctgtccccaaatacctccgtcccatcgtagcgcgcttcctccccagtgtccgtaagatgaggaagcagttgcgcttcgcgaaagacctcttcattccgatgatccacgagcgcagactggcacaacaggctaaagaccccaattataccaagccggatgacttcttgcagtggatgatggatctgagcgaggaaaagaaggaggacctcaaaccggataccctggcgcatcacatgctgctcttggtcacactggctgttactcacaccagcacgatggccttgtgccactgtatcttcgatttggttaccagacctgaatacattgagccactgcgggaagaaatcacacggactctgcctgatggctggtatcggacgactcaggctgcgcttaaggagcagtcccgtctggacagcttcttgcgcgaatctcaacgcttcgctccgcctggtgaatgtgagtatcggatcttttcttatggctgcgccgtataaccagtcagggttagtgtgttagtatcatgctctaatcacctacgttgtctagtgaacttccaccgcatcgtcaaagaaccaatcacgctccatgatggcctcgttcttccagtagagacacacgtctgtttcgctgccggtccgattagcaaagacgctgccttcgtcaaagacccaatcaccttcgacggctttcgctggtgccattaccctcgggatcgctttgtcctgacccctgagctcggaaaactcgacgctatgctgaacggtgctggtgagatgcaggctgaaaagtccgcatcttccgcctatttcgtttcgatcactaacaccaacatgcatttcggcttcgggctccaggcatgtcccggtcggttcttcgcatcgaatactttgaaggcaatcctgagtcgcctcattcttgactatgaattcaaattcgttgaagacctgcaggggaagagacccagtaatcttgtggttggggagcatattcttccgagtatgactacggagatgctgttccggaaaagacctattgggctttgagtagaaggggagatgttacttttcagggctaccagaggtcgatgcccgatgccatacttattctaccaagatgttgcggttcttgctttacatctaaatatctcagactaggaaataagaatattgagtttgatttcagttccatcgtacagtcatctgcaatagatataagcactgccacgacatacatgtcgagacggggcgcagatatctaaagcgtccacatacatagagggttcgaatccaatcgtttcatcatatcttctctcgaatatcacgtcgatcattccctaggcagtgggctggggggcacctcctcgcccacgacctcctctgccacggaacccattaccacgaccgcggccacggccacgtcctcggtccaatccttgcggcggcggaacgcgagagtagttctgcggacggaagttggggttgttttggataataccctcgctgggatcgctgttgtccattgcgacatatccgcctcgcgcacctccccgaccggcacgggggccacggggaataccgccaccattgggacggaaaggaagagtggtctgttggccgttgttgagacccccgcgacctccacgtccagctccattgccttgtccattgccttgtccggcgacagctcctcggaaagagcctctcaggggcggaggggcagttgcgttcctcagttgtccctgtccgtgaggaccgatgggtgcgccgtatccggcaactgtcaaaggagtctgggtttgctgggtttgctggctagctgtggcacgggaactagtgatcagttgtcggttggagatgttgaggagggaagatgctaaaacagtttgaccacggaatggtgagcatcgaccacctagcgtagtgccgctcatgaacgacacatcaaagacaacatcaagcagaagtgctcgtggggttctggttaaaccgacaacagtgccacgagtagcgattggcaccttaccagaatcttgggcatacacaacccgatcaccaagctggaaggtttggtttccgaggcggtgctcgacatcggcaggccgaaggagtgcactacggggcacaccccgaaccttcttcggttgcatatctggctgggacgcattgagattatcggcatcctgctcaatcaacatcacaatatccgagtcaagttgctcagcatcgaggggcactctctcgaagttcttagcttcaatagatttgagccaatccttaatctctttcatcttaagggcggcgatttcctctggatagaaatcagtcggagaataacggtcgctttgagggttgcgctggattccagcgatgaattcggggaatttaatcatgtactgttgaagcagttccactgccttttggctaaattcccagccagattgtcctcgacgggagtatccaagaaccttctgttgctttgcctggaacttcaggttaagaccgaggttcgcacgttggccttcgatatcaactgtaaaggaagatgtgatcttggctaggaccaaaggattgaggcgaagactgcgcgcaacagcgtacgaaggcatgtaggggcagagttgctcagatgccctaacacgctctcgaccgaattctggctcccgacccttcacagccgcgaccaatccattcacctttccgtcttcgtgtcccccaacataaacaggtcttccatagttgaaatcacccaagaagaaggcacgagaaccctctgggaattcttcttggatagagagagcttcacgctcaataaaacgttgatcaggattgatcacatcatcaacaacaacctgtagagcataatccgtctcttggccgggaatatcagcgaattccttgattgtggctccatcgtctgtcttgctcatgcctttcagaagttgaatgtggaccagagattcgacatcgccaatgataattgctagacgcttgctgtaggtgccctcaatcttgttggccttcctcttccactgctcaatttgctgaggggtatgaggaatagataaagggtgttgttctccaggaggtagaacataatcaaataattcatccgaaacgcggaccacaagagcttcttgtaagaatggataacccacgtgaatacgcttcccaagcttcgtcttagccagttcaatgctcgaccggcttcccggatcaaggagtgtaataacctggctctcgttgcggctatcttgattgaacacgcaaacgccatggaaacctaattgaccatggtgcggaagtgtcttgatgctagggaagccagcaagcgctgccttgcctaagtggacgccgtccattaagccagcgtagggcaccaatccatccatgacggggaggtcaaagaggttctcaatacaacggcagctaggaagatccgggaatacgccaggcattgaggaggggtaaatgaagttcacttctggggaataggtgaatttgagacaaaccccaaagtcgttccttgctttttcatccgcggaaagtaggttttctttcgttttgagggcgtccaaaagccgtttttcgtcgatgaatggaatcttgacaacggcttcccattccatcttttttccgttcatatccagatcaaaatcacgggggtagaaatcgtagatgggggaatcagccgaggtcatcaggtcccaatacgcagtaggcacgatcttcttgctgcgatcgggcaagacacccataagctggtcgaacggccggaaaggctgtcccaatttgaagtccatgtctgcaccaagaccatcattcacatctgttcaaccgttagcaatcagaataatccaacaagaaaaaagggggattgggtactactaaccagaaatcataggggcatagtggtactggaagaaccaaggccaagaagcaatgccacggtaatagtagaacaagacccactgcaatccttgcacgtagttttgcgccaacttcttcatctcttctttgttatcgaggccccagccgaacttggtccgataataattatctttccactctaaaaacttggcatcatatttctcctgcgcggacttctgtgcttcctcgggagtcatctcttgaactttggccttctcgtacttccgaataatacgctgaacagccaccgatgcctcttcgtcctcttcgtcatcactgtcacactgggttggaggcaatgtgagtctcatgaatcgatcaccgttctcgttgtcgatggaggaccaaggcaaccggagctcatccgcaagctgttcgacgaaagcgcggtcacgagctggaagtgtaggagggaggtcaaggggttcacaggtcttatcagaccggttcagaacgtacttcttgaccgtcttaagtatctccttctgagcaggagtgagcgtaagctctttcttctgttgcgaggtcgaataatcaatgcttgggtctttcttcgatttgatccattgggcatcggagttttcagcctcaaagaatcggtattccacggcactaagcgcagtcacaagcatgcccaaccgttgcacgttaataacaccctgctcgttgatgtagccgcccatttttggcagcacctccttgtagagcttgaacataagggcaagggcaccctcgttgatatgtaagtttggcaggttgggcaagaaatcgttgccaacgaaaaaggccataagaatgaaatcatcaatgacacgctccatatcgaatgggaaatccagaacaccatcttgttctagctcttggaattctagttccaaatactcccgcaccacgctcagatgcaggaggtaaaagttttggtgttccaattctttgggcttcttggatacttggcgaccaaaggtcacttcctctcgaagaagacagaagtgagggtcatggctgaggagacccagcatgatcagatcggcatccagaccgtaaagacaatggcgaacgttggattcatagtcgggctgcgctttcgagcagcgaatgtattccataatcttgtgctcgccttctccgggaacctcatggccagaaagcacaatttccacaccttgccaatctgtgtcctccgagattttcttgttgatgaagtatttgagttgtttcgtcaatttctgcatgaactcggtacccggggtgatgcagttgctgtcaaaggcatcttcctttggcatctccaggccctgctggatagccttctccttcgcattctctgcatccagggccgtccggaatcgacgcgcacgttgttgattcatcttagcgcgaggcgcaacaccgtctaccgccatgtagaacagtttcttgggcttgattttgccaaatagatgttcaatgtaattgaagatggcaatgaacatttgatcctccgtcatgcgaaacgtcggggagtcgctgtcactatgtgtacagttgtgaataataccgttcatgtcgaggtataggctatcgaattcgggtatccggctctctgcgatcagcatcgagattgacggataccgctcactcagccaacggaagaatttcgggacacccatggtgaagattgggtccgattgaagcgaaggtcgccaataaagaaatcggcaggtgatgtatcgtaatagtttaaagatcgtatgaggggttcttggaaaggactgaagtagagttacttgcgacgaaaggtgaaatcatccaatgaacagatcttggatgaggtactgcgtcaacgaagtggtgtccaaagaagaatataaaaggacaaacgtaaacaagcaagagaaaaaatatataacgccggactgacgcttttcggttgtctatgatgcgatgcgagacgtagtccccgcggcgatgcgatgtgaacattgaagagtcaaccccaagctcattcaccgcctaccaatcaggtttagtgccattacgggtctctcagcactcattaacgcgcgaatgcgcgtagctttcctccgcctacctatctgcttcacacactctttctaagtggctgaagttctgttatcttgtgatcttattatattgcttgatcctataccaccccaaagccatggatccctatgaagacgatgctggtgagcatccatgaccttgcgcactactcaaaaatctcattctaatgaagacctaggtgctggtgacgagcacgagaaagaccaggatcaggaccaggaccatgaacacaatgatgagaaggcgatcaatgaaggtagctttgctcaatctctccagttctgccaaccacggtatctaattatattcattggtcacagagtacaaaacatggaagaagaatgcgcccttcctctatgatatgatcctgagcacagcattagaatggccaactcttacaacccagtggcttccagataagcaagagtatgccccgaaaccctactagtcccactggtccaatcatcaacctaaccacggctatcttcagagtcccggacaagccctactcaacccaccgtctcatcattggcacacataccactggtgaagcgcagaattaccttcagatcgctcaagtgcaactcccaaatcctaatgcgccaaaccccgaagactatgatgaagaaaagggagagattggaggttatggtgggggctcaaagaaggcacagatggagatcaagttcaatattgtgcaaaagatcgatcacaagggcgaggtcaacaaggcccggtatcagccacagaacccaaacatcattgcgacaatgtgcacggatggtcgggtgatgatctgggatcgttctaagcaccctagcttgccaactggcacagtgaaccctcaaatggagctcctaggccatgaagctgaaggcttcgggcttagctggaaccctcatgtagccggtcacctcgcgacaggcagtgaggataagactgttcgactttggtagggcacagcatgaaaacccaagaatttggtgtgactcgcagctaatgaaggtcaccacagggatattactacatacaccaagggcaacaaggcagttcggcccagccggactttcacacaccactcctcgatcgtcaacgacgttcaataccatcctctccactcctctctcatcggaaccgtctccgatgatatcacgcttcaaatcctcgatacccgccaagaagactccactcgcgcggctgcttccgcggaaggccagcaccgcgatgccatcaactccatttccttcaacccggcttccgagacgattctggccacgggttccgccgacaagactatcggtatttgggatctccgtaacctgaaatcaaagctccactcgcttgaaggccacaccgattcggtgcaatctatctcgtggcatccatttgaggagtcggtcctggcaagttccagttatgaccgcaagattatgttctgggacctcagccgggcaggtgaggagcaaacacccgaggatgctcaagatgggccgccagagctgtaagtgaccacgatttgttttcttcatgcaatggtttgtattgttcgctaaccttgctccttagtttgtttatgcacggtggacacacgaatcgaatttcagacttcagctggaacctaagtgacccttgggttctctgttccgctgccgaggacaatctactacaggtatggaaggtagcagatgcaattgtgggcaaagacctggaggatgtcccaacagaagaaattgaggcgtagatattatttctaccggacttgcagttgtctcatcattttccatatggctgcttctttgatatagttgaatcaagaccatagtgagtaatcttaaaaaacactatttcctttgaaatctatatatattcttgtgcctataagggcatattgttacccatggccaccaccaaccatgatagtctaactaagttacatggcatttataattcttgtagactcgaggaccgcttagtgatatcagcattcgtttccaacattagtcattaattactaataacgaaggacctttagaaccgccgaaaatcgatcgctaaaacatccaagcagtcttccgtcgaacacattgattaacacacgtctgatcaagctccttatccttcgaacgagtcatatatatacgtcggtgtacccctgagctaacttaggtttcgtcagtccatatgactcgcttctaatcgttaaccttctagtaagcatgcttgagcgcaaaggctattcgtttagtacggtctctttccgataccacaggcttttgtgtagtaatgtaccggcggataccatggtatttcaggaagcggcgtagtgttcgtggacaaggcagattcgttacagtggttacctctgctattgtcatcctgcgagctgtggtgtcttgtcggataaaggccgtgattttgttcaataactgctggcctagctagcctagtcataccagtacggcggggccttccatttagataaataacacgccagaccgtatggtatctgacattaacctgcctcataagctgctggtatgttaaataccatactgtctggagtattattcatctaaatggaagacctgtggcctgtactgctttggtcaagctcgtttcggttctgcccgttactgtggtgacattcaaccttatatataccgagctccagaagttttgctacgtacaacttgggatgaaaaggttgatatttggaatctcgcggttctcataagtaggccatcaactccatttctggacaatgcaactaactcatccaaacatggaccattttccaacataagcaactattttatgccagagattcaaacaagaaacaggcaaacgcttaccatctcgctgagatgattgcgattcttggaccgccacctaaagaaatgttagaacaacgactatgctacagaattctttgatccagagggcacgctatccctaacatctacacgtcctgtcacaaatcaagcaattcaaggtcattggaagggagcggcacccattccatcaaccaccttagagcagcgggaggaaattttgcaaggtgaagagcaacaactctttcctgccttcatgcgcaaaatgctctagtggcggccagaggaaagaaattttgctagagaattattagcggaccagtggctactttcgccataattgaatagggccatttccggttgacagtcttgaatttataacataaatacatagatagtaggaatataataagggtattgatatgtaggaaggcggtattgaaaatccaggggtgcacggacccagtagctggggccggccccagaaaatccagtttatgcataaattacgtcttggcggtcataaacatataaaatctgcagaattatgcacacaattagcgtgtttgcatggtttgtaacccaatttggggtcagattgagttgggtccgggtacgagcaacaattccctaaaaaaatagttctctctactaacgaagcatctgggatataagctagactatgctcgaaacaatacaccgttatatgatatctcttaatagattatgaacctgaatcaactgacttagctcgagagtaaaaagtagaaaagggaagagagagaagcatagcagaaaaaccagcttggttattgattgaaagccggaaaaaactagttaaagggcaggtttgccggcctagattcgagagacatctcttaataactaatatgccgttgcttaacggctattgtattgtgcgtgccatcttcatgggggtgggatttatacaacacattttcagcttcatccataaaagcaattgaaatcacatcctctgtatctgccgggtcggtttgtgacttacgcgacctaatcccactatgttcgactattagcttgacagcgaaatggaattgaaggtttctaaaacgaaacgaactagatttgatatcctttgactctctcatcctggttccatatctgtcaacactagaaaatagtagaaagtggcttctcactcacctccttttctttggttttaactaatttcctcaaagatgatacccagggtctaggaacatgttcatgtgtgacttttctaccagcgtggcaagccgtgcaactgttgcagtgaacattgttgcaaaagttatgcaaagatagataaataaggtggaagacaattgtctaagatgaatgaaagtaacagacctaatgatgtccttaaccgaacgtgggaaatggtgtgtttttatacacggatcgattcttataatcaagctgtatgtctccggcatctgcaccaggatcctggtccttgcgaggggcagtatatttgatgttaattgatattagtatagaagctatcaatttcaacttcctaaataggaagcattctctacgagcgggttcgatgtggttgcgaaggtccgcctagtacaagaagcgaaaagtgtaataataagccccttgtcgtagtccgtgcggccgatacgagcgctggtcgataccttgtctgtggcttttacgagactaatcgataaagcacaatcgccaaaagggaatgagatgattgggcacgaatgggaacggaaagttggattccctaggatctgtcatcataataccaaatttgcatgctgcattgcacgtggcgtgcctgattccaaacccccgtctgattccaactacccatccaaccttccacctgagtcattttctctctgagatgagtaccccagacatcccgatcaggttatatctatacggcaagccatttgactggtcggaagatgggttatttctgaaccagctgattgtggccgaaaactatttgcgatttgcacttaagtcttttgagcaaaagcggaaatcccacgttgatttacgagaggccatatgaatcagcaacatttggcgtagtataagacggagatacaccagcaattacggttatcccgaaaagtgggaacgcaacgcacctatggtcttaggctgctctacgtaagacctacattccaatcatcaatttgttgctaataaattagtcagtatgcgttatactactgttggaaagcccacagtgctagcagagctcttgatatacaccgcgatgcagatgattccgcgctatgacaaattgtaactatgaggagattggggtcttttttacataatttgacccttagcgaatttgggacgcagtatttagatacctgggggtttacagaacttcaccaaattctacaggattatcttcgctgattaagacgagataaaccctcattaattgcgctgatactcgtagtagaacaccgctcatatgggcaatttggctggtttcgtatgtagatcctattagactatgtatggtgccgatcgctggatgatcgccatgtgagcgtcacggaattaactaacttaaataggttagtggcacttatagaggactaatcataaatctagaccaatcagaaagctgttttgagtagtctcgcggcctggcccgttcatctcgttatcctcacctcactttgccatcaagtggcaccaaaaactatcatcatgattacagagatagccctgctacctgatactctcgctttgcagcgcaatcaggaccttatgagggaatttgagaaggcactcgagataaatttagcagtcaatttgaccactctcatccctgattcctatttttaaaaatatagacacacaaccacaaagtttagaaacaaaaatagccaagctcaatcaaaaaaccgtcaaggaactataggacccccttagaaatgatccaaaggtgcacttgctttcgatttcccccaaactatgctcgtcgttggcgattcgcaagccaaaccagtgaaaaaatagcaaagcctgatataatggaacaaccgaaagttccagactttcggatatgtcttgatagtgtggagatagctgagatcattttcccactttcgaaagatgtgactactatgctagtgcccttctcggatttttctaatggaaataagagtactgagtagccgctactcttagtaccgcgacgaatgctttggaactccaaaaagttatggaaaaatccgatacggggcattgtcgtttaatgcaattataatattattgcaaaacctatcacgataaacggcaactacacagagtatacggccttgcgataccttgaagaatatgttctggaaattcctgctcctagaccctatgcctttatcaaattcggaactttttataagattttcatatcctatattccgtctatgacattgagcgaagcatggccgtatctcttacacaaagagaagatttctatgaagtatcagctagatgtcatctttaggaagttgaggattgtgaggagatagatggccactgtctgggaaggttcggtagcgaaggagtaaatggacacgaaaccaatagaatcgtcagcacggccgctggatttgaccccccatcatggcagcactacatacgcctctttcctccgctcttttctcacagattctgttaaagggctggccttggcccatggtgatattagacaagataatatcatggtgaagctgaatgaagacaatatctgggtagttactgagatcatcgactgggaagacagcggattctatccgaagtaccacgaatgtactcaactgaccaggacattgagtaacgaggaagataactggtatctctatttgccagcgagtatctcgccgctgcaatttccggtacgttggcttgttgatcgactttgggatatccatatcaaaaccacctagttgagtctccgtgtttgaaatttatttatatgtgtgctccccttcctctacaccatggacagaaacatggagtgtcacggagtatgacatatatctgcagtcagactcattgttatagaaatagcataaagattaaaccaagattagtttcctcaatccgcgatccttacagactttcagcctatcaggtcacaccacatcacgtgatattgtgctcgtacacttaggaaggccatttgcacagttaaacttcgctatttcgaacttcgagcacaataatacgactaagcccttgtctaatggtgttcggtcctgatagtagtgttgtagacatataatgactagtataatgactattcgcgtagagctggatctgtcctactgtctaagtagctagtgagctggctaatggcatttcgtctagcactcaaaatctgcagcgatctgacttcttttcaagattttgactctttgtatgcataatgtatgtacaacatactactcggccccgtagtccgatatctgcccgcggggagcatgtcatcattctggtcggttttgattggtgctgattggtggggggcgatgaggggacaaaagaaagttagtgtcgtttgctgaaaaaaaaaagtaaatctgatttccgatactcacctcgtttattattaatatcatcttgcaaatctgagaaggtgacatatctgaacttatatcaacatccaacttcatccttgaaacgtctccatcatgggttccgattcccctacaagccccagggcctcagccattccgtcccacatgttgaacggcagctccccgctgcatccaacgggcagccgtcattctcgtgagcgcgagagtctcaatacatccattcgttcctcttttgagcccagaattccccttgaatttgaatctcctcagaccaagaccgagaccaagaccgagaccgaggccgaggccggaactgagactggagccgcccccgcccagtccgtctccagtgcctccgtgccaattcgcagcgtcgcgccagtgcggtatgtatacagcgatataaccattaatgataatggtgctttcgattccgttgctaatctctgcctagtcctaccttgaatgaccctccccgcgatccccgggatgaggccgccccattgacacctgtagccactgtcagccggccacagagcccctacacattgacccctcctatcgactttgacggtctcagctggccttgttagtgataccacccctctcggtggacgccactgtattggtaaatgtctctaatcaccgtcacctaggccccggaacaagacagcggaaggagtcaacaccggaggagaccgcggaacggcttgaaaagatgtcaggagctgtccgaacaatcctggaatgtattggcgaggatccggaaagagaaggacttcgtgagacccccatgcgatatgccaaggccatgctttatttcaccaagggctacgaggagaatgttcgcgatttggtcaacaacgctgttttccatgaggatcacgatgagttggtcattgtcaaggacatcgacgtcttctcgatgtgcgaacatcacatggtaccattcaccggaaaggtaaattgccgcagatatcgatactgtgattatattcattctaacaatttacagatgcatatcggatacatccctgaccgccgtgtccttggtctatcaaagctggctcgtctggcagagatgttctctcgcagactgcaggttcaggagcgtcttaccaagcaagttgcgttggcgatttcggaggtcctccagccccgcggcgttggtgtcgttatggaatcttcccacctctgcatggtcatgcgcggtgtgcagaaggttagcagcaccactactactagctgtatgctgggatgtatgcggtccagcgccaagactcgcgaagagttcttgactctgttgaaccggaggtaatgccccatctcgccaaccaacctaacacaggttgttgatttttgaatttctggagttggtggctacctttcaacaggttttgagtggtttgcttttttactttacatcttaagcgtggattggtgtttctcttgtcttcccttctctcggttcttctgcacatactcaggcaaatatttgccctggtatcttgtcatgttcctcgtccatgaagctcacagccttcttctacgggaaatggcaaacacccactttctcgacccatgatggtccgaggaagaaaatcaacccccctcattccctatcctatatgccctttcccctaccatactaaaacaatacctcaagaggcctttgctgtacaatctattgagatctcactcgatagtactagcaaggctgtttcaacacttgatctcatgccgcttacgagcatccagtaggaattctgggagctatccacttagatacaatgtatgtattagaaccaatgtacttattagaatcaatgtacaatctctttctaattaatctctctcttgtttcctcgttgagaacagaaagacaaagctctggtaatggtgtgttgatgtccagcattgaaaagtgtcgagctggaaggcctacaactgatttttatagagctatctggtctctcttagggcttttataagactactcaagttctctaatgcttcatcaaggacgaggagtaatgtctaccacctgcctaggtcttgatgggctgtcaggtagttctggtccctgagtgacctcgtccatttgaagataggtactgccagaggccccttcaaactacactcctcagcgaggacatagttggcggtgaatgactaccagttgcacgtgcaaaggcctctcacacgtgcaccccaggctcgcttgttgtttatatctagtcctctcgcacacacactcttcttttccttcccatccctctcgtctctactatcccatctctccatccatccattgaagtctccattctaatcttgctctattcatcttcatttcgtcctacaaactattgattacttctacttgcgcttcttgcacgttttctgctactttttctacttgacgcacttgtgcatcatctttccaatcctacctctcaaggtctcttaccacaacacacgacgcgtcttccacggtcactaaggtgatatcggtatcatctatctctgtaagttgtctgagtcaatcctggttccttgatatgtgctgtacacaacactgggctcctatgcatatcacaggttttctgaatgaaagtgtgatgtggcatttgcttgtctattgtttactatcattattcttcctgctatgatctatgaagaattatttggatgtatgaggcgcgtcactaatcagtttcctaaaaaaaggttctcgcgttcaaacctatcgaacaccctacagtgtacctgaagtgtttgccctaacaacactgagcaccacaggtatatgaaacgcgtctggttgaatcaagcatgggacttactaacgtggaagtaaagggtcaaataatttatttgaacacaatggagaacgacgctcagcgctcggccagtgatgactcttcgagttccggtctctcttcccaggatgatgaccacgacctcgcccaacccactaccatcaatactactaccgacactagatcctatttgccctctaatgtatcccttgaaattctccaggcgcacctagacgctgacggctctgactcttccgatgcttctggaccgcgggtacatcccgacttcttcgtccatcttgaaaatctacgaagggtcaacgaagccaatcgagtcaacgcacgcagagatgctgaagcctggtatgaagctgcgatggggcacccgcctcagcatcaagatcctttgatgttcaacgggtcccagcatgaagcccctcagatgcacgatcagcctcagcatgatgctcctttcatgttcaacgggtcccagcatcaagcttctcagacgtacagtcagccccaggatggaactcctttcatgttcaacgggtcccatcatgaagcctctcggatgcacgatcagccccagcatgatgctcctttcatgttcaacgggtcccagcatcaagcttctcagacgtacagtcagccccaggatggaactcctttcatgttcaacgggtcccatcatgaagcctctcggatgcacgatcagccccagcatgatgctcctttcatgttcaacgggtcccagcatcaagcttctcagacgtacagtcagccccaggatggaactcctttcatgttcaacgggtcccatcatgaagcctctcggatgcacgatcagccccagcatgatgctcctttcatgttcaacgggtcccagcatcaagcttctcagacgtacagtcagccccaggatggaactcctttcatgttcaacgggtcccatcatgaagcctctcggatgcacgatcagccccagcatgatgctcctttcatgttcaacgggtcccagcatcaagcttctcagacgtacagtcagccccaggatggaactcctttcatgttcaatggatctcagcatcaagcctctcagatgtacaatcagcctcggcatgatgctccttctatgttcaacgggtctcagcatcaggcttctcagactcacagacagccccggaatgaaatttctttcacgttcaatgggtctcagtatcaagtttctcgggcgtccaaccagccccagaatggagcttcttcttcagtgcctaaccaaccccagaacggaagtttccaatttgccaacgaaacaaaccaaccttcgtaccacgccggtaccggaaatggattgcagccatcggcgatgggcatgcgtgagcgatatgaaacccaagattccactgcagccgggccatccgagccgtcgctacatgttcggtttgcgacacctactcacattggtccttctcaccctagagacaatcctcatccgcgtcggcctccttctccctaccctgtggggttccgtcgcccatatgcttctggtccaaattacatgtcaaatcctcccttgccaccgtatcctttgccctcacctcctttgccagcacctcctgtactagcacctcctgtgacagcaccactgcacccggattataccgaacacgggaacccttacagactcgcatctgagccagaattgcttcctgaggatgccatcactcatggtgaagaacgcattgtgcaatcatggctcattcggcagcagcttattgccggaattcctcctcgggaaattcagcccatggcacaagcacgcgaaagacagcaccgaacccctccttacatcatgctcaatgagagcggtgcccatatcataagaattgaacctgcccgattcgagggtgccatgcttcctctcacaggtcttccttggctgccacagcgcgcaaattctagcgcgccagcctcatcggatgcacccgatgcttcgggtatgcccactggtcaagaaatcgcgactggttcaagcttatctagtactctgaactcgccgcttgacccaaacttgttgactgcaccaagctccccgcgcggcctagctgccgccaactcgccggttgcttcgcaccttccagctcctgcaaccccaccaactgtcccaactctcccggttaattcacgcttggctgaaactccaaacttgccagtcaccccggactttccggctagtcgaaatgcactagctactacaactctgctggctactttcactctgcggcctgactctactgtttcggacccaacttctgtgccagaacaaaattcggcgaacccaaatgagcatgtcgcgggaagtctgaacccggatccgcgtatggtggcattcttccagcctcttaggctgcatgaaacgacccattccgtcttggctcccgcggaaatgcgcgtagaagcaccaggcacaacccaggtcggcgccaacgagaaccgtcaaacttccgtggctacactgcagtcgccgtcgcagggcggcatgcccctgactgtgcagaactacaccgatgctgactccatcggttccccgggggctcctgggatggtcgtgtctcccgcccgctctcagggccaagggtcctctacggggaccgacaccgacaacatgccttcccccggggccccccagcttgcgctggagaaccgcgacgagccccccactcgtcgtgtgcatcggttcgcaatcgatggggtggatgagtcggccgaggtgggccgattctctgcggaagcctttgcttccggtgatcaatcctccgggggagggttgatctaaattttcaacgtttgtatgagtgaggcctctctgaggcgaatagtgcttacttcgtgagcacgaagtgaacggcgtgtgagggggttgtcaatctctgaaaaatgagatggagtatatgtagagtattattgaataaacttgtatgattacaattgtttcccatagtaaagctactaccaatgcacgtagaagcaatttctttgtatgtcgtcgcttgatcaatgtaccacggcaggtcacagctgcctttaccaatgagcctgatacagaagatgagacaagtttccacgcgcgtcgcaggcgtttccttaccaatagagcgctaggcaaaaaataatactttgcactactggggctaatcccaagtcctgcaatgataggactctccatcacatcgacccttatgcagatgtgaaccgtcctatacagcttaccttgaaggactttgaccccctcataccgctccagctcgcctgcctcgacttctgtatcgagctcccgaaccaagatcgatgcgagcgaataggagcgcccactacttactgctctagctgtacagggtctcggactggatccaaattgggattagcccctgtaagagtagtgaaatcgctgtgacaatagtactgacacagatattgttgcgaagtgcggtctatttacgtacatacagggtcacgtgacctacatgtgaccccacgcccagttccggcacaacttcaacatgcccatgacatcaacctacctctttgccttctcggttcctcgctaagctgattcggcgttgcgggcatccctttatgcatactccgataatatattatgttgaaactaagtccctagtttttctggggaatgttcctttttttcgggtatgaatggccggatgagaatggccgggggtttgtgttccagcccatcccgctctatctcgggctgactttcaggccacgcccttgagttccctgcaaccacatccatatcatgagatgttgctttctcttagattacaaactgtcgatttttggtcctgcaattgatcttgctatttaatatcggaggcggggtgggctgcgcgcagggcctaccaacaggccgcacctttgggggcttgcgcattctactgcattgtactgaattggggtggaggaaccattgtttttaggctttttctgccttgacctctcgtacattgacctcattcggtatgcttcccacattgtcgccggcatattgtttggtcaaccgacttggagacctggacatcaccaacatgaattcgcacccttgtgtggcaggaccatgaagatgcagggcttgcaaatgttggcttgaaacaacatggcgaacagatttccgcccgtgttccatctctgtcccggtggtatttgtcccctgatagtcaaccacgagtctatctgttgtaaatcacgacaaagcttcattccaacgcgcacttttttcctggttcatgatgacccggacttcgacaactgaccaatctacaccttacaagacatcgaagaactgaatggctgggtgtcatacagagcatcaaagatgtttgcgacaaagaatcacagcgtgtcaattcggtccttgaaattgaccaacagctctatggtcttgggaaagaatgataagagactccagccatttatttgatggtgtgacctgataatccaacggggattgtcctggtgccccgggaatgttggcccatctggccttgtgcaatacgtagatagtttcattcgtgggacaacccaacgcagtctcagtttggctttgtcgaaaacaggctgctgtacaaaagggcatggcgagcacaaagcagacaatatgctagcaagccggctagcatgcctgttttatccgacacctgggcaccacctgatcagatcatcacgtgctagcagacacagactggacacattcggtatccaaaaagaaactcggagagagcaaaggagaagtacacgttgcacttatcttcgacatctgcacgccatcccccagcatccaagtgtcgaatcaagttgtagagccgcaacactgatcagtcatcaatcccgaggtccatgggtttctgaccttgaaaagcccaccctccacggccaagtagtgttatttctttacctgagaggttgagacaggtgtatatgataaatctgaactggtgcgtgtgccccattcaaccctccccttgcttatgttttcgttgttcaccagcgcttgatagtgtacacagttcggatctggaagaactgtcgttccgagtcccccaaacccgaaagacttccgcctgcgatcgcagacacgctcgaacgccatcgctcgctgcgctttctcatcattatctctacttcaacgcctcttccaaccactggccgtgctcacattatctatttcgccctgattgagccagatgccgtttgcgacgtctacatggctgggtcccgtacgagtccggtgttaagagaccagtggagcgctgacccagaccgtgatccccgcgacatggatagacggagaggtcgagggtcaggccgcgatcgagggagaaacagaggtcgtgaccgaggccgcccatatcggcccaataaccgcaatttcgatcgcctggggcggtcgccaccacgcgcgtcccgctttggccctgactcttctaacggcatgggtgatttcgctccagatcgatctcctcctcgaggttctcctccacctcgtaactttcacaacaaccgtcgactagatccaacccaaccagtgacaccagccggtgactggaatgcccatacttctggatcttttgacagagaagaccccggtcttcgaagagacgagtcagcaaccggacctccacagaaacggcaaaggactcgaagcccatcaccgcgtggcggtcgtggccctctccctcccccgcgtccaaattactccgataattgggatatccgggatcgaagcccctcattcaagaaacgaggtggccgcaaccaaggtcgtggtgctccaaggagaagatcaccacgccggggccgggaccgtcgtggaaaagaccgtcgtcgtccagacatcccacgcccgggaaggtctagatcaccggttcatgaacgagggttccgtccttcgcttgatcgacggtctcgcacccctggtggtgacaatcacagcgaccacggatctcactatcggtcgaactcacagcactcagtacggtctgcaacctcgagatattctgaatcttctcgcaggtcgaggcgtaactcggcgatgaacacaaaccgaccaacccaatccgttgtggacgatactgctcggcctgcatctccaccgcgcccgattccaagttttgactctgataacctcggtcatctcggagaacaccgagatgagttgccaatacatgcgatgcgctctgatgggaataatcagtctcgccatcggccgtctcgaccacatcttgatagccggccctatgcagacgctcaaaacggaacaacaggctcgtaccccggttcgcctcaaccaccttcaccttactcctcaggaagaggaggatggtcgggcccgcctccgtgagtttttggattgctttcacttacatgttacattctgaattatactaatcctctcttcaagtcatgcctccccttacaggaacgatgactattcatcgcaaaatggaaactattatcacaaccaaggtcaatttaacggccctggcaataatcgcccgcaatctccctatggcgggcctcctcaccgaggtggccactctggtggcggtcatcgagggaacttttcaaaccaaggtcccgatcggagattttctggctctggccctcatccataccataatggaccctcacaacgcggcgcgagaagtcatttcaacaacttgcaatggactgcttcgggatcacgaggccgtgggggacaacatagtcctcacccggcgcacatggatgggtcacaaactcccagtcgaccgcagtcccacaatgaaccgcaatcaccccgagccggcgaaagtgaacatcatcattcccggccccccactagggatgaagagatgaaccaggcacaacctcaatccgcctgcgggaatcccccatccatgccaccccaaactcacgaatccaacgaaacaacgccggcaaacaagggcggcaaatttagctttgctttcaagtcaaaggctgcaccttctcccgccccaaagccagtacctgaccttgcccagaggatgttgcaggtccgcgaaccggccccccgtgcaccggaaccaccccaacaacctcgcaatcggttcaccaatgggccattgcccagatttaagccagactcaagggctgatcgccgtgaccgagatcgtggacgaaatcgggatcgagaccgcagagatttccgagaaccacgagaattccgtgatccacgggaccgcagagatgatcgccggttcgatcaacgtcgtgatcggcggcaaggcgaacggccaccggacaggccctcagactggccagatcgtcgccgtgacccttctccggaaccgccaagagaaccatcaccacccaagcaaaagcggattcttacccgtcctaaaccacgtcccacaattcccgctgagttcgctaatgccgaatctgtgtactaccgaaagccaggaaatgagtctgtgatcggcgctgggacatatggaaaagtgttcaaaggaatccacgtctatacccaacgtaaagttgcattgaagaagatccgaatggaaggtgagaaggatggcttccctgtcacggctgtcagagagatcaagctgcttcaacatcttcgcaaccataatgtcgtcagcctcctggaggtcatggttgaaaaaaacgaatgtttcatggtctttgaatacctttctcacgatttgaccggtctgatcaatcatcccactttctctctgactctgtcacataagaaggatctggcgaagcaaatgttcgaaggtctcaattaccttcaccatcgaggagttctacatcgcgacattaaagcagccaatatattgatcagcaaccgtggattgttgaagtttgccgactttggcctggcccggttcttctccaaaagtcgtcaacttgactacaccaaccgtgtcatcaccatctggtaccggccgccggaactcctcctgggtgaaacccgatatggccccgctgtcgacgtgtggagcgccgcttgcgtttgcatggagatgttcaccaaaaaggctgttttccccggtgaaggtggcgaattgagccagatagacaaaatatacaatgctttgggtacccctaccaagactgagtggccggaccttgtggagatgccctggttccacctgatgcgacccacagaacgaaggaagcgtgtttttgaggacgtatactgcgatgtgctgacaaccggtgcgatggatcttatatcctcgatctttcgctacgacccttcaaagcggccgagtgcggaggatgtccttaaacatccatactttgtatcggaggaaccaacccctcatccgccgattgagtacgttttcccatgcccccgtttgtatatggcccctaataacctttgtctacagattggagcacgttgaaggcgactggcacgagtttgaatctaaggcgctccgtaaggaagctcggcgcgtcgagtatcagaaccaaaaggatcgcgacaagcgcaaggccgacacatcggtgcccagcagcgatcgggattccaaacgaaccaagcaggattcaagtgatcgtgtctctgcgcagtgatgactcttgcttcgcgaattattttattatttattttcttgctgttttaatgcatcggacatggttgacatgattggtggactggggatttactttttcacgagattcactaccctaggtactcggagttctttcgggcttgttcttgtcacatattgcccattgatcaataaaatttagatcaaagttatttgtatggtcaactatggatatcgaaactgtagattcaacaggtggatatcatctaggtaagctaatgcatgtcggttccagtccatcgggcactaaaagagacaccgatatagcatatcccaaaatatatttcaaggctcagactttgcctgttgaccgcatgctcgaccagcccgtgagcccggaggccaaagtagtagggcggttgagtcctcggattaccagagagctcaaaagagtttcttcattgcgttgaaatatagaaatggaaatagagatcgaaatggattgctattgaatacacgtaccctatactacatagacaaaagagacaaagaaaaggatgtgccgtcaatcaggtcatcaacgtttcatgggtggctcgtaagccctcgtgatgatggttttagatgcgatcatttaatctcgacacacacatcggaaacgccagtgctgtaaaaacaatgagtcgccagcgttgatttgagttggtggtcttgatataagaagaaaagaagaagaagaagacaaaagcgaaaaacgaaagaaaaagggaaaactggaaaaaagacggtgcgggctgcaggcgaaaatggggctggccgggcgctgattggccaggacagctgctcctccaaactgcagtcgagtctccgattcatgtcgacacttttccccttcacctgattccccctctatacctctgtttgtctgtttctctattgcttctttttactcaagcctcattacccccatagttcgattcttcccgctttctttgttttcttctttacctgcattactcccgaatttcttcttcttcggaatttcccatcggccactatactacgtcactgacacaatagcgccgacgtctcctttcgctgtgtaacgcttcttacggatccccttctttcccccctgatgaccgctcgtgtctcgggcagtcttctcacccgccgcgatggataatgcaaacctgtggacccgccggacaaagttagtcgtgtgcccctcctcacccaggtgaccattgtaacttatatggcggttgtttcttctcattagctcgtccaagttgtccctgtcaacgtccggagcggacgcgaaagacggtgcccgtgtcgaactgccccgcctatcgaagcgcttcggacccgacagctcgcatggccgctcgaatccattcaacgcaatatccccattgtccggcggagtttcttcgccatccaccaatgcatcctccgcttttggcctggggtccggcgcattcgcctcattcggtgcgccgaagactcccggtggctccgagttgaaaacacccggacgggagtcgcacttggaacacgacgaggccactcgcaaggcctttgagaaccactccgttgctgctcctggtgagcacccgttgaagtctacatggattgtctggtatcgccctccgacacccaaatactccgactacgaaaagtccaccgtgccactcgcttcgatatcttccgtagagagcttctgggcagtatactctcatcttaaacgcccttcgcttcttcccacggtttccgactaccacatcttcaagaaggggattcgccccgtctgggaagatgaggcgaacaagcggggaggtaagtggatcgtacgtttcaagaagggggtttccgatcgttactgggaggatctcctcctggcgatggttggggaccagtttgcggaggctggggatgaagtctgcggcgctgtgctgagcgtccgaggcggcgaagatgttttgagtgtttggacgaggattgacggggggcgcaacatcaagatcaggtatgtaaaaaagtctgttttaactcatcatattaccggtatatctaacttggttgcagagaaacgatcaagcgcctgctttctttcccggcagacactaacatcatctggaagagccacgacgatagcattgcacagcgctctgccatcgatcaggctcgccacgacaagactgccactggcacgggtcatcaagaacggcggcgtacaggtcaagatgactcggataaggtcaaagtgcctgtggccctataagaggatccaagattccagctggccttggcccctgtatagtaaacccgaaaaaaaaaccttcaatcacgaatcattgggacgcgtttgggtcttagggcggtggggcatcgaggcgaactaagcggtttggtttgattatttatgctctgtgctatgtgtttttctttttttttttgtgtctgccgagcttatgcgtgatgttttcctttatgtacgcaacatgaatgcagcattggctgctattggttttctcgcctggtttgtgtgatgacttggttcgtttgatgtgaagtagagcccttttcacttggacttggccgagcttagcgtcagggctctgacagatactccgactagaactatgtatgcacaagccaaacaaaggtaatagtgcatggtccggggatctgggtacaagaaccaatgtgcaagccagaagccctgataagtatgtattgggttgtattcacgctattgggtattagggcattgtgctattgtgttgaatagtatcaatccaaaaggtatgaacaaagtgaatcattcaacaatacaactgacttatctattcatctattgattgatctattgatctattccaagatagttagttagttatcaagaatgaaacctgcatgcctaaagcctcaggcgccaacaaatgctcaccgccctaggaccagatgacgatgcggcgtgcttgctccgatgaatgagaagaaaaaaaaaaagacaatagacaaacaatcaattgaataggatctatgcaatgcatattgtcatgacactgtggctgccttcatgcctgtgtttaaaaacttagtcgaactcttctctagcttgtcaccacgacgcaaacgtgagaccgaagatcaacgatctgctcttcaacgggcacaaccaccgctctcgacccctcctcgttctcgaccagctgggtctggtcgtaatccttttatcctggcacctgacgaacccgatctgaccgaaaccacatctccccagaacgctgcgatcgctcctctttcaacggtgtgtatctcccgctatctcgattctccatgcgtcttagccatctatgctcctttttgataactcgaccctgcacaatttcctcgcattgggcacttatctcttggctccgcatgttttcttattgcaaactaccttcgggtatttgacttgggactaatctctcttatcaggttgttcatagttatgtcgattctttttcgtctccaactggatctacaaccgcagaagaaccattgcgcacacgtttctcccacccttctctgagtcccattacccggttagacatgtcccgacgaaacccacagaactcccctgccggcaggccagagctgatgtcctcatccattcccaggccgggtgattcgtcgcaaatgttgaacaaggaccagcaaacggattcccagaatcggaaagatgaggctcggttgcttggaggcagataccagtatgtccttagtgtgtgtgttgagttgttcgagatgttgttgctaaccggctggctttttgcttggtagtgactctaacgctgtcaagataaagctcggagcatccctcaatgctcggaaaaagattccaggggtaagtttccgcctttatatgaatggatatggcatgtctaatcctcggtcatagtctaccttcgcgttctccccccgggacaaaatttcacagaatcaaaatacccgaagcagcgggccagtccgttcttacggagaaccaaatcaacaaacttcccggagaaagtcgccccaattcgaggatgagtttgaagagtcgaatcgacctaccaagatgcggcgccagagtaaaaccaacgaaaccgtcgaccttacggccccaacgaaatcagccagaaatcggttggaacagggactctaccgccacccaaatgcaattcgtcgcaaccgacttgaaggttccagggacgcggaggatagcgtcaaaggagctgcgcaaagctctaatcgtcctcgacatgaccaattatcttccgttgactctcgggatgaaatgtttaccgaaacagcagcacagcagcgacgaaatcaggcggattccaggttgtctaacgtaaatggcaaattaaaccaggctgcagaggccgttgttattgggagcattgaggttagaccaaagagagctgatcggaaccgcactgcagttcctacgagcatacatcgtcctgtcaacggcagagaaagtccagacgagcttcagggggatatcaccacacaaccagtaccgagatccttatcgggaacacaactccaagccactcgcccatccaaacccgaaattcacatagaaacatcgactcgaaaacgctctccgtccgctacccgaagtccagacttttcgccgccaacaccggtcatgaagaaggttaagatatctcaaaagaactccgataagatacacctagtgcgatatttccgaatcggcaccttcggcaaatcttgcgattcgaggcaattcgtcccaatttatctaaccaaggatggctttgagcttcgtgagaatgcactcggccagggtaacacgatatcaataccttttcacgaaatccgtcaaattgtcgtcggcgagacgcctagccgaaaagtgagaatcaaaatgttgcagagtgccgtcaaagaagacgatcagcttgacgttgagttctggaccaccgacgaaaagagaaatttcctggaagtgttgaaacaggcgaaacaggcccagcgtcccaccaaagatatgtaagttttgtgggctatctcttggatgagttcgcgattcactaacattgcaataggaaatggatggacaaggcgtttttgaagtatgaaaaacaatttccacgggagaacaagcggcctaagaagcggctacttgatgacttggtggacgatcccgatcctgagcactctcctcctccttcgcgacggcccaaactttcaaagtccttgagagatgaccatggtgaagtcaacaatgtcaattcacttgagatcaaatgcgccgctcaagaaaaagtaaaacatggaaacggcaatgttgattctcgaacgtctgccaaagaacaacagaattctcgacctcttgataccgatagtggagctgatagtcgatttgaacgcgagacccgctcttctacccgccgtggcgctaaaaagctgtcaaatggagacgttacatctgaagcaaagtcgaatttatttcccagggatgattctttcaggaaaaattggaagaaaccgttggtgtatccgcgaaatggaaagaagaaggctgaggtgacactcgttgatcgagaacggctactgagggacgacttcctgaacgataacctcattgctctctacatgcgcttcctccaggatcatcttgaacgcaccaacaaagaggctgccaagaggatctacttcttcaatacctacttctttgcgactctcacgaataccccacggggggaccgtgggatcaactacagtggtgtggagaagtggactcggaacgtcgatctcttcagttatgattatatcgtcgttcctatcaacgagaatgcccattggtacgttgcaatcatttgcaacttgccaagcttgtcccttggttctgctgacgccgtagagtcggttcgaagaccggctctccaaaaagaatcatccaatgcgtctgagagtgagatccaggaaattgaggagacacctgagccggaactaaggtcaaagtcagagctcaacggttctagtgaagccaaccaacctcgtgagattcgagagggatctgagaccagggggcagactgagggagatgagcatgcgatgaagccagaggagcagtccgcatccgacaacccacttccacccccaaatctctccaaattcgcaggccaaaagctcgcccaggaccaggccgcggcgtcacaaccgacaaccaaatccaagaagaaaagaagtgggttaaagttagatccgaatcaaactacgatcgtcacgttcgattcccttgatatgcctcgctcccccaccatcaaaattctccgcgagtacatctgccgcgaagcggagtctaaacgcggcgtcgaacttgacccgaacgacgtcaagggcatgcgagctcgtgatatcccccttcagcctaatttctgggactgtggtctttatctactggcatatctagagaagtttgtgcaaagcccggattggttcatcacgaaggtactacagcggagcatgaattctgtcgatgactggcctccactaggttctggtctcctgcgataccgctttggcaagtttctcgatgatctatacgaggaacagcggcaagccggtgagcctatcatggcagtcagacggcctatttcattcctgcttggcccgcctcttccttgtcaggacgaaattgcggatgttgatgtggtacctgagtctcagcatgagacagattcttcaaaggacattgcgaaacctgtcaattcaaagatcgaagactcgagcgaagattcaaccgcggagcaaatgcatctcttacctaccgaaaacctcccgaaaccaaaagacccgaaaccgaaaacatcaccctccaacccacctgcagatgcgaagtcgcaaaatgaccatgttgctccagcaaagggggaacccatcatccaagtacccggtagccaggaagagcccgaagtgccaggcacaccgtcccctaagaaaaaagaacgaaggaaacacggccattcgcgaaagagatgaatctgttcatgcaagtgatacagttattgtcaagacgatatcaacacagtaccggctggaccgggactgaccatcatgaatccaaatatgttcactattgatttagcgtttaacccatgtacgcagcatggcaaaccctgcgtcagcgttcgatgaaagaaggatggtgttgttttttcttcgtgtctttaatggtcatagcataagataccatcacctacatcgaaatgcaaacttaatgtcttttccgagaaaataccaataatatatgtaactaccactcactctcatccgcctgaacccaccacgccattttatccctcttaaacgactcaaaatcccactccgaatcctcaagcatatccttcccagcagtataaacataagtcatagccaaaacttcctccccctcagccgcaacctcagcgccggtcgtcgcattgagcatctcgcgcagctggttctcagcagcaccctcgctagaattaacgtggtcaccacccaccacagcctgcagcgtgcgcacagtaacccgtttcttctcatactccgatccctcaaatctgtccagtcggtgaacgtcgccgtctgttagtcccgacacgagtgttcctacgacggacgtcccagcgctggttttcggtgcagataaattggtctcggtttctgtctctggcaccgccacgatcccggggtaatcggcgttctgcacacgatgccgtcggtacccttgtagaatggcgggttggaagcggagcatggctttttgccagggctctgggttcgcctggccgtggattactctgtggaggatttggggcgccattagggttcctgggtagtttagttctcggtttctcttgattcaagaaggacttaccgtagaagaagaggacgtggtcgcccattgtgtatggtgtggggtcgggttggttattgcgtggggatcgagggaggttccaagataagaaattctatagagcttgaggtaaggtaatatgtatattcgcaaattcagtagaagcttagagtataaagagaatcacaagacaagagaagagaggaacgaagccatgagagttgtgtttattgcggagatgacgagtttatagatgcgcttatcgataagaccccaagatccaaaggcccagctggcttcatcttcccaattcgtcccccaacacaccatgcattcctccctgaaccgcatccaggccgtattcggcttcttcactacagtcgcgctggtagtcagcgcactggcagccgtctcggtcctcttcttcccagcagacgagaccaatgcctccgtgcagctgaagaacgtgcaggtgtaagtgaagtcgcgatttgcagccctaagacttcgcaaaagccccccatttactaagatccgatttcgcggtataacagcgtcaaaggccgaccgcactactactccactaaacgcgaagaatacgcccagttccgcttcgacctcgacgcagacctcagcccgctcttcaactggaacacgaaacagctcttcgtctacgtgtacgctacctactcctcctccgagaaccccgactcgcaggtacgcctctcggagtctatcatctgggacactatcatccccgcgaccccgtcgccgtattcatgggagatcctcaaggataaggtcatcgcgcttctccccgcggctgttttgtcggattctgtcgccgctgcacagaggaacgctaagcgccatgctaagccgcctaagaaggcgaagaataagaaggcgaccggtgtcctgaggctgcgtggccagaagggtaaataccaggtcagtgatattaccggtcggctggcggagcgtcagaatgttacccttcatgttgggtggaatgttcagccgtgggttggtgctttgttctgggcgcctggtacgggtgctgtgcccaggactgccggtacgattgtcagcagtgagccttttgctttccctgaggagaagactgctgctgagaagagagctaaggaggcagccgaggaggcggagaaggtgaaggtggagaaggcgaaggcagaacaggccagtgtataggctttgattgggtctgttgatatagggagttaggatctacctttttttgtttacttttgggagctttggctcgccttatacggttgcattttgggaatgatacatatgaaacgcatcatcattggatagtgcaaacacagctttgtcatttcattttttgttttaggtgtccggttacaccatgaagaacaatggtcgacgctatggatacagcagaggtaagactcgattaggtttaacgtcatagagaatgccgaccgtggacagactaagacaagcatctcgaacaagatagtccggagttcgtccaaagcaaatcaaatggtaccgtaattaacgcctgcgggtggtgcatgatgatgacctccgttctggattcgatcggagtagacgccgggtgcgggttgttgagaggcacgagtcaacggatcccgattgcgacgatcataataaacgtattccaaatagaaggcatggatgtgtccggggaagtaactgggagatatcgctggttagttgtggaatgtaacgggaagtctggatgtatagcactcacccgagaagtgtgagcaggaggttgatccagaagtcaactccgcagcctgaaatcataaaaacaccaagagggggaactgtttggttcgttagcagatcattctggtggataggttggtagatcgaggggcggtggatcactgtgtggggatgggttttgtggtagcttttgatgtaatttccaacagcagaggtgtttacttactgaatatggtgatgatgatcaaacaaagcatggagcaagtgccggccatgattgcggtgatgtttgatgtaggtgttactgttcaggtttggtagatcgaggcttgaaatcggtagtggccaaaaaactaagaaggagaattgcaaagaggaggatgaagatataaataggggtgttgtcctcggcgggagagttgttgcgtttcatcttgatcttggccacgacgtcacaaggtctgagggaactcgtacatagggctgaggcagccgtgaagctgatttgctggctgagtacatcatgacgtcatctatagctggcacctggacaccgccacatgccacgagtcaatacgtggctggtggctgtacagagacggcaagtacaattgacgggcacgtacattgaacggacttggagaagatgtagaggtactgggaatatatttcctgtgatatccccagtatcaggtcctaaaccgcgtcaatcgccgcccgagttgtaacctgctcgttcttgttgccgagcttcgagaactgcaagaatgcgtccactccatacccttccagactgtgcagttctaaactgcctgcccaatattcagcatagactcggctcatagggagacccatccctagacggagattgggcggtcgggatgtcaatgtgtccagggatccctcatggtatgattctcggtcggtgtgtttacggtcgtgtgacacttgcagttcttgcatcgtcgccgccattgcgggcacctgtccgagattttccagccgtgtttgcgtgcgaggacctttgctaaaagaccacagatacggcagaatctctcgagggattcctcctccttgatcagatatgcgcatgatcacatgctgcggggtctcgcacacgagcacttcgatagggggtgggggttcggttgaatcctgataccgctccatcactgcctgcaccgagtttcggagaagttctccgatgatatattccaagtggctcaatatatatgggaaggtcgcgtcggcatggcccttcacgacgatcgcggggatctgggtcgaccccgatatcttcttcatcagatcttgtgcgacctttccacaatcctcgattacctccttcgccttgcactttaggaacacttcgccgacaaattctgcattgatgtcggttcggtcgtgggaatcggggaaatgccatggtgagttgaaagtttcggtcagagctaggtgctgctctgcgatgactcggcgagagattcgctaccgataagatacttgtcagctaggaggcaggccaaaggtcgaccttacataccgctcgcagaagtgtgttcattaaccggtccatttcgtccgctggggcgagatttcggcattccagcacgcctatcgccaggttgggaattgcaaccagatgttctcgtagcatttccttcaggatgtcacagaaacggtcattatcgtcaagcgtcttaatctcaggaaccacccgagccctctcgaatgctttgtagtacagttcgtatacaagggtgagatgggggttggcaactaccacatatggcagctgctggatgtctcgcagacgatgcgcaaggctgtcgatgaccctgatcagccttttattttctaattctgcaattgactctcaacttaccgagtaggaagctcggtccgcacgtagtttgcggagctgataagtcgtggttcggtcaaagtacgaccaaaaaaggtcaactgacgaagactgataggtcgaatagctcgctccacccatctgccagtatatcctaattagtatccccggttcaagcatcggaaatgtgagtcatccatactcatctactgcagaaactggccgccatggcggcgggctgtgagctccagaatagaggcgtttcaagggggattggaggagctgccagcgtctagctggataagacaatctcattgtgctccatggacttattcaataagtgacagaccatagaagtgctcactatcttgtgcgtgcgcgtagttgggacttcaagagtttggggttgccgggcggtgagccaagcatgtgacaccgacacaaggcttgttatggcaagatctgttttttgctgtctagatcgggatatatctcgatatatatggaacgttctaagactgcaaatgccaatgtcatacgatctggattctcgtccgaagatgcctcgggtataaggcactcgcacggactggggctaagctcgtgggccctttccaaggttggatcatctgagggccacggcatatttagtgattgagagcataattaaagaagtatatagagcttgcagaacttaaacgtatttaggtcgctatctatatcaccgctaaatcggcccggtataaaaatagggcttttcttcaccgtatacttcgcatctagtcactcctgcatacattattgcacactgccaactaagcaaactccttttagttccaattcaaagtgagcgacaagttagagctcagtaaaaaaagctgtcaactgcagaaatcaagcacatcaaagactgttttcacagacatcatccaccaatatcactgccgagccctcgaggctccgccaccgctagctccggcccttattattttgcgggttcagacgaatttcctccaccaccagctctacagtgtatttcttgccaacattccgtcttcttattcacaaaaatttcctcaaaatacaacctctgacgccttccgggacgggaaggcgctttccgcgatggaaaacgtaagagattccccgaccgtgcccctcgctagtgtcgtcattggatctaaccctgctctaacagctcgcggagaacgacatgcttgtcgatgagtacgatcaataccctgccgaaaagaccgatgtcgtcgtcgtatcccgctcggggtccgacgagcctgagtccgcgccgaccgcagatgaccgtatgttctttgttgcttctccttccttaccacaagcaagagggctgtttgacgggttagctaggcaaagcatggcacccgaatgagatcgccctcacgctgtgcactgcctctttgcttatttgtgctaagcggtcgctaaccaagagccccggtggatatagatgcggcgatggtggcaaaggtcctcccccacaacacggacctcgaaaccctagacgaggtctataacacatggcgcttgtcagactggcgcaagatggagcgcaagtcgcacggacccgtcttccgatgtggtggttcaccttggtgagtgcttgaaaactctttgcctggattggctccatggctctgtgccggcattgaatctgacacggaaataggcgcatcctcttcttcccctacggcaatcagaccgaattcgcctcgttttacctcgaacatgcgtgggagaacggacccccggagaactggtacgcttgtgtgcagtttgcgctggtgttgtcgaacgtgaacgatccttccatttatacacaccatagtaagatattcaattccggaggaatcgcttgatcaaaacgctaagtcgaattctagttgcaacacaccgtttcaccgccgaggaaggggactggggtttcactcgattctccgacctcaagggcctgttcagccatccgtgggagggaaaatccgtcccgttggtgcaggatgacgaggcaattgtcacggcctacgttcgtgtagtgaaagatcccacgggggtcttgtggcatagtttccaaaagtgtgttttttccgcgaggtttgacccgagtgaagctaactttctctttttagttatgactcgaagaaggagactggaatggtgggattgaggaatcagggagccacatgctacctgaactcactgttgcagtcgctctattttacaaatgctttccgcaaggtatgaaagggaaaagttcgattgctcccgaattatggagactaatgaaactcgttaggctgtgtatcaaataccgactgatcaggaagcttcgcgtgaaaacagcgcgtgggcgctccagagactattttacaacctccagaccaatgatgttgctgtttccacaaccgagctaaccgcatctttcggatggcaatcgagtcagatctttgagcagcaagatgtacaggagctctcgcgaaaactcatggaaagattggagcacaagatgaaaggtacgattgccgaaaaagttctgccggatctgtttgtcgggaaaacaaaaacgtacatttcttgcatcaatgtcgattacgagtcttctcgtgtggaagacttctgggatattcaactcaacgttcgaggcaacaagaccttggatgacagcttcagggattacattcaggtcgagaccctggagggggagaacaagtacgaagctgggcagccatacggtctgcaagacgctaagaagggcgttattttcgagagcttccctcccgttctgcatcttcatctcaaacgttttgagtacgacctcaacctcgacatgatggccaaggtcaatgattatcacacattccctatggagttcgatgcagctccttatctttctgagagcgccgacaagtcggaatcctgggtttaccaattgcacggtgtcctcgtccacagcggtaacctcgatgccgggcattactatgccttcctcaaacccaccaaggatggacactggtaccgctttgatgatgaccgagtcaaccgagctactgacaaagaagtcctggatgagaactacggagactcccagcagcgcacgaacggagcgactggaggacggtccgctatccgcacaaacaacgcctacatgttggtctacatccggaagacaagacaggatcaagtattattaccggtcacaaaagatgatgtgccctcccacatcggtatgttaagagattttccttcttaggagaattggacggctggctaactatggaatagagaagcgtatgtcagaggaccgggcggagatgttgcgtcgcaagaaagaaagagaagaagcccacctttacatgaatgtcggcgtccttgacggggattcattccgaaaccatcatggcttcgatctgactagcaatgacctacccgcggaagatccggcgcttcccacgcaatacaagattcttcggacaaagaaagtcagcgaatttgcacaggaaatcgccgaagaacgaaaactcaaaccggaagccattcgattctgggtcatggtcaaccgtcagaacaaaacaacccgacccgatcaggtgatccgcgatcaggaaatgactgttgaggaggcgtacaacaaattcggcactaaaggtcagatcttccgcttgtggatggaggtggcgccgatcggcgcagacggacaacctactccatggcccgataatgactcgattctcattttcctcaaaaactttgacattacgacccagaccttgactggtgtttgctctgtctacgtccacaagagccagaaggtgagcgaactggccccgacaatcctttccaagatggattggcctgccggtacagagttcatgctctttgaagagatcaaacataccatgatcgaccttatgaaaccaaagcagactttccagcaatctgaaatccaggacggcgatatcattaccttccagcgctcaatcaaggaatctaatctgccaccctcggtactttacacagacgctcggcaattctacgattaccttttgaaccgcatggaagtacaattcgccccggtcaagaccaatgagggggaaactttctacttgactctcagccgcaaaatgacctatgaccagttcgccaagaaggttggtgagcatctcaaggtggacgagactcatcttcgatttgcacccgttatggctagtactggcaaggccaaacctttcctgaaacgaaacgtcaatcagaacctctcacagatccttaacggtcaatatggtgcctacgggtacaccatgcaccgggcagatgctttgtactacgagatactggacatgagtttgacggactacgagagtaagaagtgcttcaaagtgacatggctccccgatggcgtcaccaaagaggttagtgttaagcattccatatccatgccgcagggctttggctaatattcatctaggagattgttgagatcttggtttcccgtagcggtaccgtcgcagatcttctggctgcgttgcagcagaagttggaactgggcgatgagccgatccggattgccgaaacacacagtggaaaagtctacaaagaacttcggagcgaccaaagcgtggctgccattaacgagtacgccacactgtacgccgaaaagatcccatcggaagaattgaatatgaacgccgacgagcgcgtcattagcgtgttcagcttcgatcgcgaacccagccggactcacggaatccccttcaaatttgttctgaagcctggagaacttttcgcagagacaaagaaacgcctttccgcccgcacacagatcaagggcaagaacttcgagaagatcaagttcgccgtggtcccccgtgcatccttttctaacgccaagtatcttgaagatggtgagtgccttggctttgattccattggtcggactgactaactcctcacaggtgacatcttgccagatatagcggctagcgccgatgacttcctaggtcttgatcatcccaacaagagccggagcttctggggcaagagtgatggattctccattcgttaaacaagtgttaaagtcatggcgctggggggggggttacgagtcgagggctatatgctgcaatccggtacatgagcagcgacaccctgatgcgatgatcatgcctttctcttttttttttgcgtatttttttcatgtaaccagtcgaagtagaagacaataccgtctgcatgatgagtgcaaattgtttatttcccatgtgtgttgtgtatccctacaaaatagactcgtgaagtagtcagaagtcgacatatgcggaagtttgtttgggtgcaaacaagtcaaacagccgaagacaaagttggcccgaacggactcctgacgcggatatcatcccccagttcaacggtccctctcggtatatctgtctcacaatgcggttcgctcttttcgccggtctggcctccctggtctcatccgtcaccgcaactgccctgacctacaggctcgaggcgaacgagaaagcatgcttcttcacaaacgttgagcagagcaacgccaaggtggccttctacttcgcggtacgtccaattggttattcatcaaacacattcattcagtgatattttgttatggtcgcggagctttggatacatttggtggtgccgaatgctaataatgtacgatgcaggtccaatctggcggttccttcgatgtcgactactccgtcaccgcaccgggcggcaaggtcgttttagacggtgccaaggagcgacagggcgactttgtcttcactgcgcagagcatcggcgagtacaccttctgcttcaacaatgagatgtccacctttgccgagaagatggttgacttcgagattgcggtacgttccatatccatcgacttgacgaaccggtcaacaaatgctaattgagccattgaacctacaggtcgagaacgaacagcgcgctcaattgccctcccgccagggtgctagccccgagcaaaccaccagtctggaggagtccatctacaagctgtccgcgcaactctctaccgtctcccgcaaccagaagtacttccgcactcgcgagaatcgtaacttcagcaccgtgcggagtaccgagcgtcgtattttcaacttcagtgtgattgagtctttgatgatggtttccatggctgcgttgcaggtctttgttgtgcgcttcttcttccagggcgcccggaaaggtatgttcatatgttccccgtatttgagatcggatataggcgcaagtcatagtcgtgtttggactgttgccgccgctgtctgtcctacttggatgattcgtaataacgattatttaaaacaggttacgtgtgatatgagcatgagcatgaacaataatatgatgcattttactacctctatgtccggcgtgttggcctagttatttctgttgcaaaatctatgttcttgtctgtctagatcaaaatatactagtatggtacgaagtagttggcttcgagtcatggtggtccgttgatcgtatgtcacaccaaaggaaagccattgaggtgaatatttggtttacaaaagaaatatgagaaacacgaattcaaggctgatggtctacggtgtttcattaggtgggggatagtaatcgatatagtttatactaagttactaaaataggggatttacaaatcactaagagaagatgggttgacacgccggtatgatgaaaagacactgtgatagcgtatgcccggcacgctcgagatgcccgatattatacgttgtaggccccaagtctccaaatcactcttccagagatatgaacggtgtccgtcgaagacattgtgcaaagaggaggtcgggtggtctgcgaacgacatcaataagcaccgacccatagcgcagttgggaaggcgggggtgatcgttgcttcatgttcgtatatgttggtatatgctcgcagggatagaaactgtttatgttagatggtcttttgttgactcgaggccgatgaaaaagtgtgtcgatgttgtgctggacccgttctccattgttgcacctctcccgatgaatgcagccggggaatcagatactcaatgctcgctgctagcagggacagcacctgtttctaggcgaaggataattctgttagaatgtggaattccagtatgtggaatggcttacaacaaaacaacatgcgaccaggatccagaccgcagagcaaaggcgtttggaagctcacatactaatgagtttctaaccggtttcatacgtcagtcatgcattggatgtcctccccatatgtatatgatgccaagtccaatgcattgataaaccttggaatactatgtagcgtgctgagtgttgtctacaaggtacggggcaatgttgtacaaagtaccgtcgagatcgatatctgatccaaaacaggtttttgactttcaatatacgaggggcatgcaacaaagaggatcgataataaatgtgtggatatagggttgtcgatgactgtcttgcccaggggcatcagggtaaggagctatgtacatatgacgtgaggcacttccggtagaatcgactaataagaatcgactagtgatatcatatgcttgctacggtgtacaagatacgttgtacgctaagcttccatcctctttgacctacatacaatacatcatagatcgccgtcaagaggctgtggtgtgatatcatttgagatacgctggggattgtcaaaccccggtatctgactcaagtaccgtttacattgatcggcggacagcaacaatgtatgttgtatgtattgttttccgaatcgggaaagtctgatctgagcctcgtcatatgtaatggtcttttgggttcatatctggtttaggtcttcagaccaggcacgagatggatcaggataatgaagaaagtggatcgtgaaaaggcattgattggcattcaataagcagaggaagacccgcaagtgcacaatgcataatcgcgcacgcttgtttttgacacgctccgctgttgatacaatccacatacattatccgatgctgtcatatctatgatcagccccttgaggtggaggagcggtgttatggatcaaactctattagactatattgtgaaacctacattgtactccacaagtgcctttcgacttgcgacatcgcatagaattggagtcaatccttatacacattatgtagtatcatagtttctccaccaattgtaacaatatctctctggatctgcatattgtagcatgataagctcagtatattacttgcattggtctagaccggtgctagctggattagactgcttcctcagaacaggtctagtttgaaaagtcagatagccgatcatgactgtaacggacaacataggttgtgtttcaaacgctcgtctgacgttgctgtatgtctcgtacatgaaacatatctcggggaaaaggagatctgatatgctgggtataggcctccgcttgccctaatatgtcagatatgtcagtctaggtttgtagtagtaggtagtgtgtcaccatcaagttgggcaaaatgtacaacatgatgctgaggcaaattatcgtgtatccggtgtcaagccgatcttgcaataatttgcctccccccctcccggctggcatcaacttccgtccagggttcatggatggcaaatccgtaccctcctccaccgttcttcggttacagatgatcctaccactggctcccacgtgtcgtaccgatcattcatgccaatatcatgtccttctagaacaatttcagactccaacaaggtggaacgaccctggtttccatatcggaacgcagtcggtcgcgagtttcggctccgactctattgataataggatcttttggttccagtaccgtgcttgagattcatctgccggaagtcagacttatttgcgattagacacaatatcgagtagagctgtggtcaatatacaaacataatatcatttgaagatgagggctccctgacgtcaggtgctattctgcctcaggcatcaacgctaaaattctcaaatcactagctcctctccacacgcccccatttctccctgttattttgtccatttctgatgataccgcggcgaataagacagtctgagaattaattaaaccttcatctgctgcaagctatgtctccactgtggctgaaagcctccatgcctttgatacgatgtaccagaccgttccggattcaagctcagttccgcttttgataatcgaaaaccagcctcgggtagtaactcctttcgtttgccaaatctacgaccggcgaatctccgccggccgaaatacaaacctaaatcgattgctcgggtcgccccgatgcctgggggtatgacggcatagctccgttcgacctgagcctcagctacgcaacggcacgcccctttttctcctgcggccacccgggactacttgatctatcggtttattttgagtcaatcgagggatccagggctctcgttactccgtactagaactacaccctgaattgcggcttttcaaccgcgtattgaccactttaccactcctgcgccgggtctccactagcgatgtccacattttccttcacaagaacaccctatcccgtagcgagacagaatgcaagatgggcctcgcccctcaaaagcccatgggaattcaattatgattcgtcctgcggacgtcaggcaaagatctgcaggggaccggactgtaattgtgccgatctaaaaccgccttcgcctctcactggtcatccacattccccagtgacctcatcggagaacggtgaccaatccataggtggaacaactgatgatatcgctcccaaagtgcaccagtctctgtgcacatgtggatattagttagttcagaacatcctctgatgatgatttgaccccacaccgtgctcctggacgtacccaataatcggtcgacgcggtcacttatgtacctcaaaaaaataagggctggggtttatggatgctcggtttatgatgcttgtgatgatgcttcttatgatgtcgcttaggagaaattatcctcccccctttcaccccccccccttttagctaattatgtcactgtactccgcttggtgtaatcggtagagatctcgtgcttaccatggatgaagcagaaattaggcaccctattggcctatcagaggcaaacataggtgcgtttgcatcaacaatccaccgatgtgatttcatatatataaaccttgctcgcagattggatccaattgttcttcgtatatgccctaactcctgaatctgccccatagcactttccccaaatatttcatgcgctggcccggacaacgtaccgtcggactttcaatttaacatcgcattatctttcctattcgcaatctttaggacctttactattcaactcaactgccaaacttggttagatcttgaaatattccacaggtgagtgaccttgaattgactggtaaataccatccggcttccccacggcacccctccacggggatcgtcccatacatcagccttatccccatgccgtcctatattatatagcacacagaccgtcatgatgccactgatcagcactgttagcgctgcctgatactttgtcttaagaacataagctgactcgttcactactagccattcttccaccatgactcactccgctcaaacgcaacaagcaaccgaagacatccactccatgttcccaactgctggcgtggacaacatggccagtgagactcatgttgaatcttaccggtcgcttgatccctctgccgcctcgctagaggactacaaccgctccatgctggaatacacccagcgccaaatgtcttccttcgtcgacacggataactctcgccgtgatagccggagcagcggcaagagtggccgtagcctcgcctctagcggcagcaacatgtcccgacaggccaatggacctctcacgcccatcagcaatgccgccccctccgccgagaacaagatcggtagccgtgacatggccgacgctaagtctgctgaatactagggctgttctctgtcaaggtatgcatttgcccccatcttggtgtctttgatccagaaatgctaacggacgtcttttcagcgtcctattccacagaccgtgatttaggatcataacgatacatggcattggcgagccgttgatggccttattgggccgtcggcggccacgtctaatttccgtcagtgcctacccaaatgcagaattttctgcggagttttatgagattcgtgcgggagagcgtgcctgctttcaagcgatatattgaattgtttatttttttctacattgatttctatttggcctcggcttgtctgggtcaattatgaaagcgccttttctttccccaacccctttttaccaactttttatttctgctcggcattttcaggatatccgttgactctcagcgtcgaagatgtcttgaatccctaccgtgacttttacctactcattcttgtcacctgtgacggctttggagttgctccttgaactgaaaagcagtttacaaacgatatttcatccccatttcgaaaatttctcgaacgctatccattctcctggggtctgggtatgtgatcaatgcttgatattccttctggaaaggaatattggcctgtacattacttgtacttgtacttcatccgagcgattctgtgctttttattctttttgattcgatgtgatgaaccaactttcaactataccctgttacgataccacctagccatgttggccattgatgacctgtacaattatgcacaatcgaaccggagcaatcttgtttttctgctatttgttggtgttttatttcctttctcctttcttcttctccattggctggatatagctcgtactgttgtagccccgcgtagtacaaggggttcgagtggtatgaaagaatactggctttggtaactagttcatttgtgttatttatcaagttatcgaatgggggctgaaccaaggcttatgatctgagacaatttgacgtcaccgcaacaatcccattgtggcttgaacgaaagatgcgtttatcgcgcctgctttgtaatcttcaatctatttttgcgcctttttcgggtttgtccggtatcttttctagttttttgttgcaatacatatgtaagcggcaagccaccggaatagaaggcgaagcaagcagaagaaggagaatatattttgaaggaggttttggacgagattggtgtcgatctgaatcaggcagttcgttaccaaacattgcaaagtggatttcatccacagtttggggaaacaccccaacaaccctcatactccagggaatgcttgacgggttaacatttgcggcttgcaggaagcgtcttgagcgagaagtattgtgggattggtggtacgcttcgaccagagtaaagagctttgtaagttctcgttgacatccacgaaatactacacccagcatcaatgagaatatcataataaatgcacgttgtgctcagaaacacaggaactgggaatccttcttcgctctgtgcatgtgctactgaatatttgttcctcatttccaaatcgaccttaaacacaggctattttgctcagactcgataatcgcggggtctcaagatataacgcattcccaggaaaattcttttttcaaattgaccaggttcagccttatcatagcctcgttcaagtttaattcggaagcaaactgtgctcaggtatgaagcatagagcattatgcacggaaggtggcctttgtgcgcactgaaaagagactagtcctaattaaaactcgtgcgcttcttatctagttgctatacctcccaaccgtgaaaacgtactgagatccgtcttaaatctccaccaagaagttgatgatgccactatctctgccactatatctaatagtgccattttcgatgtccatgcccatgaggatgcattcgagcatgagcgcctccagtttcccttgctatcttgctggtggacgtctgagggctggcagtctgactcgctacgaaagtcttgtccgagtacgatgagggatcagtagcagtaggaggtgctattacctcaccttcgagtatctcggcggcttgttctgtctcgtatatggcagaaagaggaaggtcctgctggagaacagagcgagctacctcacgctttagccactgagcagaaaagatctcggttggcagattttcgtctgacggcggagccctgtaattattgaaggcaggccagaagtagggacgcatgtacattctgttcaacgtttagattagcgtaaatgaactttgagtgaggtttagaacagggtaactaacggatcgtttggcattgcgcggaatccttgatctgagacagtggttgtttgtccccatgtgtaggttgctattaatcaagccgcatatcagtattaattgagagtgatgaatcggggaaatttgcaagtttcaagcttaccccagcatgaactatccctggtctgggaatcaaactgcaggccgattagcgccatttggctttccggtttagaatcgcataccccataatactgtataaagtgttcatcatctaacctcgcataattccggtggtctcctgcagggaaatcaccgaatttgacagtgatcggtggtgctggtttgccttgacgggctcggagggccgagcatgggacatatacggcggcgagccaagccccatagtcgcgacctagtagaatctatcagcatcaaagatgattttgaggaatttgctccggtaaacgataaagattaggagacatgacagacctaccatggagagcattagctgggccgttaatcaagcgcactacttgatatgcgtttctggctgactctaggaatgaggcaagagggaactcatctctggagatgtcactatgtcagtgtatcaagattcccagtttgacagactggctgagttttactgacacttcgcaagtatatctccccttgaaatttccttcttcaatctcctccttccaggcataccactgggctcctcttttctgattccaagtgtccttgaaggttctgcccggtcttctcggcgccttgtgatagacagtcttaccaccgagtcccttatcaatggcccatctttggttatcacagacctgtatttatttaagccgggttttagaatgagagaaaaggttatgaagaacagaaagtgggggacctggtcgggagacttacctcgtcaaagcccttgccatagctgcatgtgtaagtaacagaacagtcctcctgggcagttgtgctaaaagttgtcactgaatagtcaccaattgttgtaactgccgtcgccggcgctgcttcaatcgtcgtgatggtctttctaggaatgtctgtaactccggggccaacagctccctgaccgaacttggcagcagcatctgcgacgacaccatccgcaccggaccccttctcatgaacgatcacttcggttggtttgacgcacatgtcattgatttcctggtagtagttaaaactagactcagcaccccacatgttcgtgacatcagagccaatggcccacaccagtctagagcctgctcgaaaagtcagaaactaagaaggaacatctaccagattgaaggagagaaaaacgaaccaaatacagcgcctagcatgtcgataaaaccgagacacgtcgggtcttcggtagatgatgaaacgccgcgtttagcaattgatttctcattggaattcgacttttgagaaagccgggagcctcgcttggtcagaccatcttgcccgacgagattaagagaatcagtgtttgcataagacgatggaacgaagtctgaacagcagtatgactgtgatccgcctaaagagcaatttgggtcagcagtaagagcgaacaatcagctatttaacacttaccattgcatgttagattgtatatagctcccaagtccgagtcatcaacataggagttggctaagatttagagagttagagacccgaaatcaccataatcatcctacggttactctgattatatactcactattgatcgcaatgagatcggacccttcagggcaataacctgtaacacaaggcatgccaacaccacgccagccataccagtcgcatgtgcctgtgtttgtaccaggtgcacagcatagtgtttggacatcatcaccgctgcaggttgtgtccagtgagattccagtgacttgacccttggcataggtctcgggtatgaagccaacggtgcattcctgaccacagaacgaccagtaacatgaattgcgattattagcaaccgcttgagcacttgcttgaagtgtcctgattttctcggcgtccgtggcagcgactccatttgttaccccaattcccaagaaatcattaccacttgtgtttgacgaactatcctgatcaagggaccagatcatgatgccaccaaggcagagttcattcgccgctttcaccttcatttgcacggtctcgccatcatcgtacgagacccattgatttgagtcccaagtgatccatttaacagcagcctcattatccatagttggtgtgagaccattgctcgaaatgatgcgttgaatctcggcattggatagcgtacccgcagacttggtacactctccagctgttccaccgtagctaaaaacgcagcccggcgtattgcacgaaggatctttcaatgtaaaagaccttccataccagccaagacctaaattcaacatggaaggatcgatagcgttacgccaaagtagatccaggccaagtcgaacctcagtcaggttggtatgaggcttcacgtatggcccagtgaacttactggtcgagtcccaaacaccgtggatatcgtatgacatgaagttgaaaaagttcaccgatttagccatagcttttagatcaaaccaacgcatataccaatatgaggagggaagtgtcacactaataccatactggcctccaaatgcggatttcatatcactcaagaggagtgagaaattgtcagtgtcagcctcaactccacctcgatcctccgccgcggggtactaggtccggacagtcagccttgatttatctgatagagaacaattcgaggttttctgatagcgacttacctcccagtcaatgtccacgccatcaaagccataggtcctcatgaattgcatcagcgatgtaataaaagctttccgattagttgcggtggatgacatgtcactaaacgctgtttgcgtatttggcgaatttgtatcatcctaaaatccgatgagagattggctaataaatgtgagtcatattgacttacattgaaggcccagccaccgatagaaacccacgtctgtaaagatctagattcggtcatgagtcaaaaatacataagatggtcagtttggtgtgtcgggttcgcactcacggatttttctgtttgagggaagtgaactgcggataaaggtcgggatctccagcatccattggaatgatctcaaaactggtggggtggaagtagacaaaggcttttcgagcggaagttagacatctgtagcgatagaaaccgaagaactaatcgcgctatttaccgaaatttacatgagtcaaggcagtaacatccaggtcggatgggtatcgaatatcacagggtcgctgtgtcgccctagaacgtaatattagtataaatgagagatatctgggactttgagagatataaagggcatatctgcgtaccagctctcgtagtatccaattctccttttggttgcgcttgaccctgagcaagaaggctccttcacagcgccacaacttccgaacccagtctgacatttatcactacagaaatcctgaaggcagtatcagtaagatcgccgacacccttcggtaatagaaagcagacttacatcggtagttccgcagaatccaaactcagagcaacaaacgttcaaggggcaggaaaccgagcctccctctgaatactcgccgcattcagctttggcatcgcagttactgaggcaaacgtccgatccacactcatcaggagaataaccgcatacgccggtctttgacaagggttagctaggtggccatatactaaaacgaagacagttcagactgactcacattgctgcagcatgcgccattagagcatggtgttcctggtgcacaggtgccggttggtaatccattgtctgctcgcttgtgaaggctggagtcagaagaatttactggcagtagtgccctgaccattggatttgccgttcttccggtaacattctggtaacgaggtgttgactcttcatgcacttcaaacctggccttgtagatactactgccattctgtacttggcttgtagcacccgtcgtcaattgggataccagaagaagcccggctaggaacagggacgacttcaagccctgcatcatgaatgaaaaatctgaattgattttgagtggccttacagtaaatactgcctgggaataaagtataaaagatatacaaatgattgtcggaggagtctgcctccgagctgtggagacagaagatccatccaatttaacgaatacgaacgaaatttcgtccgatcgaatgtaaccaacccctgaaactttctaccaaaaatacaaactacgaagccatagtgtatatgggtggcggactctcggaaggtctgtgtagtacgagggtactatgtcaactagaattcattgccggttgtcgttggtccctaaaaaccctcgtagtccgtattttttgtatgttgtatgttgtagaaaattttcaggggctggttagtgcttgatttgagacatggagttgagctactactgcacgctaggaccatccggaacctcattttctggcggggccgtggccaccgtactatctcagagtttgaactaggaggatacggaacgcccggacgcccgacttcaatctcaaactcatttcgctgattaagtaaatgcattatacataactgtaaccgtcatgtgacctccgtgctgaggtacgaccagctagcttaagaatacatatcattagttatcttcccctaggctttcaggcctacaatctagattgttggtttgccgaacctaaaacaattatagctagagagaggcgaagctaagaccaagcttcacttggcgatagtgggttccatttccaccattctagtactagtggattttgggggccaaagcatagtgctttcggaattttatgaatattttggataaaagcccgactacaaagaccccttatttcgagatatgagatcaacaagaagaagagtgcattccaccgtacgactaagagaaagcatgctatcaaagttcggtttgattaccctcgggcttagtactactgtccatgctgggttcagggtctatgatggctttcctagtcaattgattcaagttgcttatggactcacggatcagtgtctgcaagctttgtgagactttctctatctataaatacacaatggtatttcagcggctgaacaaagaccagaaacacgacaattctttgcgacaaagctacagctagtaacgcaggtggaggaccggatagtgtgtgtgagtgttgtcttctgtcttgagtttgtgtttattttttttcagaaaattttctctgattttctttatgcttgaagattggacagaaaccaatttgaccaccctatgtacgactgaatgcagcaattcgctctcatcgtggtactccacggttgaggctaattgtgaaggtcagacggtctacagtaaaggcacgtatatgctcgcacaaacagtacctgcaatgtggaagagcgggcaaaatatggtatgcttgcaggacaggtaagtctgctcgcttggggcaacttcaacagctataactgacatggtactcggaacagcgcatctgactggtgctttttggagtcacagaaatggatcggtagtgactatgtccggtgagcttactataagccacctagaactacacgaataactcacaattagctaactagatggtcaccactcgcctgctacaatgaggatcaatcggctatcccagtacagtgctctgaccccacttggtctgttactgaaatcactgatgggatgaaagatgtcactcgtctttataacagcagcctggtactatcagattttctaggaaagaatcggcccttactgacaatgagaagctttgtagtgaatgctttatcaaaatttggcgccagcgtctgatgtcacccctactaccggacggtgcacatactcagtatctcctggaccagtatcagaatattcaacggaattgctcaacaaccttgccagtcactacctatggtacaactcttttggttacagctactaccactgtgactgcatccacacccgcggggacggtcaccgcaacagcgacttcgactacatgtatgggtcaactagtgcagccgtttgacacttatcgaccctgtttcaacatatctgacacttacaatgtcagcaccggggctgtcgtccgtgcgactaataacgagttctgtgaatatgattctcctatatgtctgcctcccccctgtgagattgatactgtgtggtataatcctacttggttagtatgattcttacccccaaaagaaaaagacacttgacgtgcatttgctgacgaaggagtcagtgaggaacttgcgcaaaaatactcaacggccagcaataatatcaccttgactcagttccttacttggaatgccaacattttaggatcctgtggattcttgaatgacgcgcagagaatttgcaaaaggtctggatgaaagcagataccacctttcttgcttggttatgctgactgatagatatggtttagtccgccaggaggacacttctctcccactggagttgtgtacgccccaactgcggctggctcctactattcaaccggtaagtctcgcatgctatataagccttcacaccatatatttttttataaatatctgatcgggatctctcttccacagcgaccgctgcagaaccaacacaatcgggaactaccgcgagttgtgggttgttctataatgttgtttcaggggatacagtgagtttgcggcgaccgcttcattatcatcatcctgctaattgttatagtgtaactctgtcgcacttcgtttgtatgcaaatggcactctcttggtttgatatagagattaatcctaatattagtggcataacattcgacgagcttcaaaacttgaatacctttgtgagtttttgtgatgaagtttctcttcggttttatctactaactaattcacttagttatggaataactgcaccaatctttggctggataattccatttgtgtcgcccccgtgacgacagcatctacatcgacaaacggagcctgtggtcctgcaaatggaaacacggtttgtgagggaacagacaggtatctcaactcattcatggtttgttcttatcgataactaacatttacggctttaatccattagttgctgttcgatcaatggctattgcggagccacatctgattactgcagtgcaggtaactgtatttccggtgcctgtgagaccaccgtcgcaaccacgaacggtacctgtggtccttcttgggggggtactacttgcacaaatccaagctttgggtcgtaagtcgcccgctatcctaatttcaaaatgcacctcccagactaacatatctatagctgctgctcaatctatggctattgtggaagtaggtcggattactgcggtccaggaaaatgctactctggtaagtgcgatggtgcagacggtggattgagtatcaatggagaatgtggccctagcttcataggtaacaagacctgggttggcacgcaatttggcgattgctgctctactgctggttattgtggaagcacagaggattactgtggtaccggaaattgctatgccggtgcctgtctttgaaccttgttagtattcatagatcaataaagattgatctaagaatgtaacagccttcagtaggggtcctgaaccagttttattgccatagtaattaatacttagagcaaaatctcgatttatgtgcacttgaaatactctagatcttccatgctcttaagcatttcagaataggcccccgcttttcctacgatttgcatacttgcttgcttattgctgtttgtaactgtttgctagattgctaagcgagaaggttcgatgtttgcaatgtttgcaaatggtcagctatatcaacaggctgcttcccactttccaacttgcttctttcttcatcctcgttattttgtattgaatgtactcttctatcattgcaagaaatcgcatgccaagctgagagtatctaccacgggtgcagtgaaattccaattccacacttggtgaaacataccaatcaacaagctccacgttggaccctgcaataaaactctacttcctgatacagcttagcgttatagacaccctcggcccttgggcatatttatccagcaaagtcttcgctagtttgcaaaatccctcatttcggtgtccggggtattctatcctactgctagctgcactaatgccggagtcccaatttgacccggcactttctgccgagtttcacaacaaaattttggaacatgcatggacaggggccggaaatgacttggttacattgccttccactacttggtggcaaagttccgctcccgtcgaaattgattcccgtctggttccgaatctgtcctcgttcctacgcctggcgaaggtagttaattctaccccgccgggaccaggctccggtctctacttcttttattttttgcgcggtttacaggaacaaacgcgtttttttgattcctcaaccctcaaaacatggggtgatcgttttgtttggttatatccggctaccggggcggtcgatattgaggaagttggtatcatgtttgtgattgacttatcctattaatattttactatttcattctaactataagttagcttcgatcagagtacagaacttgcagctttttttcccgactgggaaagtctaatttgcgattgcgagaaatcatggcaatggagacctctacaggatatccttgcagtataccttcagatgatcgaagatagaaaggtatatacgtcttcaataccttcgaaattcttcccatggaatcttcaaaatttcaccaagtgtgatatcgaaaaagcagtggccgcttttattcgacttatcgacgctattgagcaaaaacttcctacatcgtcatcgccccagacccagatagatcttttatatcctaccacagtcctcgataaggcttatataaaagaggatacttttctccgatcatttcttctcgctcttccgcgtcgatatctttcgttccgatatatcgctcctgggattcaactccaatcgctgtcagatattacagatcagccttttcctaagcttttctctgatttaagtgataggatcgactataacgagaaggatacaattcctctacttctattcaggggtgagggagagagtatatccccttgggttggaccctggttccctgacggggaaccaaggtctatccctgctggcctttatatagaagatattcataaggatatagcgcaagactatggcaatcagtgtaagctacttttaccttttggtatcggtgcgaatggctatgcacgaagtagtaacggcctactacttggttattcttcgaatcctcctctacttaccgatgaagccgatcagctatatcaaattatctactactctgggcttctccctggatggagtcatggccagttcttggataagatattgacgagctgggcagagcgtgttgagttgggtgattgggtagtcacggaggatggcgtttctggagggatggaaaagtttaaggaggctgatacgtctcttcattgggagaagtactatactgcgatgtgttggtgatggcatgttgaaatgcaggttggctttccaaccgttttgggctcactttctgcactctgtgacgatctaccgacttgtgcctgccgacttgcgtacctgccgccacaacctggaacctcggccctcgcacctgccaagttcgcaccttatggtcgttctttcccgaatcggaagcgaggtgttttgcatggtttgcaacgagggaccgcacaaaaccgagtcgaagggatctgtagattgttttcctttctctttcttccttgtacttagaatcttgaatgaattgcactcctttcgaactggcatgtaacacactcaacttattgttgtatacggtccaatattattggaaccctcacaacataagcgagtttcccctttatgtatttaaggcctgcgaccattaacttgtagaccttgagacttttatacattccaattgcataccatacacttggcaagttggatcattcccttcttataatactctggttacatgcagtatccccctttgactaatgcgaccccccccccccccccccccccctcgcccccccccccccccccnnnnnnnnnnnnnnnnnnnnnnnnnnnnnnnnnnnnnnnnnnnnnnnnnnnnnnnnnnnnnnnnnnnnnnnnnnnnnnnnnnnnnnnnnnnnnnnnnnnnnnnnnnnnnnnnnnnnnnnnnnnnnnnnnnnnnnnnnnnnnnnnnnnnnnnnnnnnnnnnnnnnnnnnnnnnnnnnnnnnnnnnnnnnnnnnnnnnnnnnnnnnnnnnnnnnnnnnnnnnnnnnnnnnnnnnnnnnnnnnnnnnnnnnnnnnnnnnnnnnnnnnnnnnnnnnnnnnnnnnnnnnnnnnnnnnnnnnnnnnnnnnnnnnnnnnnnnnnnnnnnnnnnnnnnnnnnnnnnnnnnnnnnnnnnnnnnnnnnnnnnnnnnnnnnnnnnnnnnnnnnnnnnnnnnnnnnnnnnnnnnnnnnnnnnnnnnnncaaagccccccccccccccccccggctgcctgattttcatctcacctcaccgccctccatacaatttgtataggggattggtaatataaccccccttgaaataacccttcctgcctgaattatcgggcattatctatcaccgccttcctaatcaggtaccacatttcctacgctacctgctcaggtctaccactccgccttcttaggaaacccaggtacctgcactttgtatgtaagcccctaacaaaattaagtcgctctagatcaaagagattaattgttatgtgccaattcaaatcagaagaaagagtgcattttgaataagattctaaacgtagagaaagaaaggaaaagagaataaaatgcatgttattttactatatactactccataaagtttaaccatatggtagtctattttttctgccggttggattattctgccaaagttagccgatgacatttcaccgcattatttcttatgattttggagcccataggataaaaccccctggtcagatatgcactcacgaggttatgatttaattgcttcgcttcgctccgcaatcaagggattaaaacatgtaggtgtgagataaaatacgcgtttttttcgatcaaaatgtagggtttttaaaagtgtagaattaagtttagcagaattgaattgatgaacgcacccccttgcatacctccgaaggagaatctgatacactcacaagaagctgtcctcccaacgagttgtgccattgaatgtggaatgggttagttaaagatgctatcaatcattgccatgactatgttgttgtatgttccaattgactctgtgatatcgcagccaaaatagatatatttcccataatcaacagagtaccaggacccaagcccacataccacagcacgaactctcagaaagaccaataggaggaattgccgagcgttcacattccacatggttcagctcggcagcgaatcaaggccataccgtgcctttctgaacagagggatgaaacccctagaatctcggatagattgtgagccaaccaaaaccgcccaagggaggaaggcagaagaaactgcaatgatcctgtggagcagaaaagcgagaattgcatacactgaagttcaacatcgtgttcctgtttattcccctccgacacgcccatccgccaacatctgcgacaaccaaccggtccagctccagctccagccattcattttggtcttaattttggagacctgcacacactcctttaatccactgtctctaaaatcgactttcatttcggatattcaagtctcataaccctacgcgacgtggccagtcgttctacaatactattcatctactctatatttttcataccatcgcgacacaacatatacgaagagcaaaaaatcagcaacaatgcacctcacaactctcctcacgggccttgtatcccttctgtccatcgccactgccatcccaatggcaagcgagacaccaacttctacaacctccgtgggaaagtccctcatctcgccctcgagctctgcctcggcttcacccaccccctcgcccaacccttacgaggcttacacatgtcctccgggtaagttcaagtcttgctgcatgtctgtgcagcagacgggcaaggacattgtcaagtcgcttggcgagttagtgccagttctcggtggggtgcaagttagctcggctatagctttccagtgtatgttcctctctgtctctttaaatagccccgaaagcttgatcaatttatactaatccaatgtgccttcgcaggcaagaacatgactgaaatagaggctcctgatacctgcaccgggaaaggttataaccccatgtgctgcaatacccagaatgatgtatgtatctcatcctccgtttaattttcttgttctataagagaatttatctgactatccttttcttttagggtacctccttcaacacctgcaggcctttcgaggatgtgaagagggcttattattcgaaccagatgaaggatgttccagagtcacaggctgatatgatcatggacattctcacttaatgtcaaccatctggctagcccggaactctgtggcatggactgagcgccggataaactcttggggttgcatactgctaatcgaggagagagaaaaattgtgtctgtttgtttctttttacttctactcgatattatatggtcactttccttttgatagtttggttcatggagattacagtgtgtactgtacgctgttattttctacgttctattcatccccgcaggctctgtatacataactttagattgcttcatctaataagagcccgaatctcaccagattggattccatagctgtttatatatattatcctatctctacgcaaaatcagacatagccgagatatcaagttttctcctggaggtttcttcgtctgacacatctgacatatatggtcggttctcattgccatggtatatcgtcctgatatgtagttgtgtcaattaaaatatgtatacatgtactctgtggtactctgtggtagctactctgcttggtacctggaggaatagtaaaggtcacgtgcgataaagcttcgataagctcctaacatgaaattggagatctgcccacctggttctctcaacagatctatcgtgagatcgctgaccacgatggcgactcatggtgctgttatcctcaaggctgcatttgcagcttgtctcttacgcccggatcctacttcggttcctcgagatgagataaccgcgttccacatctcccttgagcgcgcgttgtcgcattgctccccagccaatattcaggtctgagccgttgtcaccgttgttaactgccaagtcccagcttactaaatacctacagacctgtaaagcctggttgcttcgatttgtcgcattttcatctaatagggtcgggggtctagtcaattacctggaagctcttgctgcgtctttctcaccatcccagcccactggatccaaactttcacccaagcgccaacgcctccacctactgtatttgatcaatgatctgttacatcattgcaagttccacctggacagcccttcaaccttctccacagtgagcgggtccctgcagctacatctcgtgaaattggtcggctacgcagcgagctgtgatcgccaaaagaacccacggcaccatcgacggctagatgagctgctagatatctggtctgagcaggaatattttcatgccgagttagtcgacaagcttcgggaagttgtggttatggggttgccgataagttccaacgatgcggccaacgaactaaacccagccaagaagcccggcaagaatgtgccctttgtcatgccatctacacacggagatccatcgacgcgctggcacgaagttcgtgcaggcaacatttatgcccacattattcccgactcgactatacccattcgacctgatgacacgaaaccgatacagttactagcaggtcctgccgatgcaaattcggtgggagccctcaaagcttttctcggtgatgtgaaccagctcttcgatccggaaacctctggggatgatagacatgcagacatcgaccagctgggccagacagtgatccggggtgagaacacaggcgacattctcgacggcgaacactaccacggatggtccctggaattctgtcaacccgcagatacagacaccgagcactcgcgcggccggagtcgcagccatagtggatcacgaactaataacaagcgccggcgctacagcgacagctctatcagccagtccgagtcacaatctccgagtggatcacgaccatacaaacatggtttccgtcgccacgaggcacgatcaagaagccgttctccacagcgctcacgaagccgcgaaagctcatacacacctcgggagccgtccacttcacacttcccgccacctcaccatcctcaacatcccccacccaccaactcctttccccctacccatatccctggacagtatgcccatcccatgggtcccaacaccggttatccccaagtacctgcacccaactacggttcttggcctccgcctcctccgcatatgccgaccatgcccttccccccacctggacccgggccctcttcgtcagccttccctcctccgtactatcctccaccttctatgccgcagggacagaaccaaggacagaaccagggacagcagcaggggtacgggatatctccgggtcagtatcacttccctcctccttattctgggggtcagcagggtggacccccggctcggcgccnnnnnnnnnnnnnnnnnnnnnnnnnnnnnnnnnnnnnnnnnnnnnnnnnnnnnnnnnnnnnnnnnnnnnnnnnnnnnnnnnnnnnnnnnnnnnnnnnnnnnnnnnnnnnnnnnnnnnnnnnnnnnnnnnnnnnnnnnnnnnnnnnnnnnnnnnnnnnnnnnnnnnnnnnnnnnnnnnnnnnnnnnnnnntggggaggagctcctccccagggcggccgtggctggcaataaacatgtgcacccctgaacatgctcgaaatgcaatcgattccaatgaactgagtcggtggaaaggcgacagccttccatgctgtggttgtcacaattacggccacaccgcagtgggtgtacttattataaactagataattgttgctgcatttcgagtatataagaccatattttactgttgaatattagctaggcttaacagttgtctatcagtttaccagatttccgatcttcagagtagagtctcggaagtgaattcccgtctatagccattttcccgcagttaacgcgtgaagtctattacggcgacctgcatgccacactaaaaaagattccccacacattttgcgacttgaaaccccgcgatggcgtatggcaatccgatatgagatggccattctattcggaggtgccgatcagccgttgcctaaagcatctgatcacggatgaggaatcccatcgaggatcaggccatagtcctgccccgcagtgtccggatcatttgcgcggttgtatggcctgactgctatgctaatcttcagcgttactttagttatataaagtctcttctatctttaaccctattttcttttcttcatatcctgtctacaccctgtctactctcaaaccaaaccaaatcaaaccaaactaaaccaaccaccatgtcttccatactcgccgcccaaattgtccgcccctccatccgccacttctcagcccaccgccctcgtcccgattcgcgcgctgcccgcgctgtcgccatgggttgcattatctccggcgtggtacttccatttgtcccccctgctttggaaagttcacgtcaacggagcttgggcatgtctacgagcgccaagtaagtcttgaatttctgccacgtacttttgcgagttggtgtggagaaactaacctgacatccaggaaccccccactttgcttccacgcgcgctagtcgccgcactcctgactcgcaactttgacaaggactgtcggtgcaggcgctgatacaggacactgcctccgagattgcgaatgtgatgcattatgccccaggagtttggaattggcgttttgaatttgctttttgactagcacaagggatggtgctattattatacattattactattgaagagagagggagtggagatggcttgatttctctctatcgctgcgactagcaaggatcattgcatagctaactttgcgcgaatggatccattactgaattgactcgagctcgagtacgtagtacgagaaacgaaccaaatgtagcccaaagtagatcgagtccgaggaaccccctcacctccttattatctatccactttgttccacactcctctattttcagttggcgacggagtgatccgtgtcaaaatagtatacaaggcggccagccgatcagctaaaccggttcccactcggaggccgatacggctgttccgtttcgtatttccccttctccatgacgcggtcgatcgccgtcatgggttcatgccgggtaggcgctggatcgtgagaagcttcagtacttggagaggcggcatcgtcggcatcatcggagttcttgaatcgtcccttactcgctcgcttcgagctagtgtcgttggccgggggcggtgtcgacgcttgtgctttgcgcttatgctcgttctccatttgcttcatttgggccttgcgcttgatttcggcttcaaatcgggattgtcggtcggcgttgatcgattgcttggcgaaatagtaggctccgccgccggctacgggggatggttagttttttacatgggaatctctgggattgtcactggtccttggccagagatggatcgatatcacataccaaggcaaagggtgccccagcccatcctgtttaggtgagatcatcagtaattacgttccggtttgtttggattttcttctttcagatagtgaaatcttcgctcaccaggtagatcgaacctagagatgacatattagtaagggtaaagaggcattgggtagaggtactcaccgtattcatggtgaatgctttggtggtgatatgtgaagcagcagaaaaaggatctctacgtcaggcccgaggtcgggcggctacccgtggacgcccggacgagctcaccgcccggcctgatgactgtaatcggtgcctcaggccaagggttatcaaccatcgcatcgtctttggagaacgcgattaaagacgacctttgtcttgatcttcttctccatcgtatatatactgtcactctagttgatatcccactgtctttcacccactcctttcaccaaccctatcctgttattttacaataaaccggagaacctcacttcgccgcctgttcatccggcgcagtatcgttccatgctggcgtgaaataccttttaactggggcgtcgctccgcctcactggtgactcactccctgagctactattgatcagaattctcacgctgtttgtttcctgaacaaagtccaaacatgcctcccaaacgcaaagcagccgacagtaagtcctggtacacatctccgaagtattgatggctgattatatccagctggtcggtctagcggtgcttcaaagcgggctacgccggtccccgatatttccagcgacgatgactactcggaccaggaagagttgccagatgaaaccaacttgaaaggtacagtgtggcagtctgctcacctgaagtgaaccagagactaaaatttgaccataaagcggtcgtcaacaagttctctctcgaggcgttcagcaagaagaatcatgcggagaagacggacccccgatttggatacaaggatctttcttcgctcccgctgaagcgcgaccactacaaccggccgttatggatcgagcctttgaaaggcacaatcacactcgagagtttctccccgctggcaccccaggcgcaagatttcctgaccaccattgcggaaccgctttcccgtccgacccatctccacgaatatcggttgaccggacacagtttgtatgccgcggtctcggtcggtctcaaaccgcaggatattgttgagttcttggaccgcctgtcgaaaacaccgctgcccgaaagcattcggacgttcatcatcgagtttacaaagtcctacggaaagatcaagatggtgttgaggcataatcgatactatgtggaaacgacagatcctgaaatgcttcagcggttgctgaaagatgaagtgatcggtccccagagaatggataataccgaaggaattatcgaacgggctgctccgaaaatgggtggtcttgtcattcctggaacgaaagatgcagctggtgtacgagagaccactcaacaggaggctgccgctgccgtagctagagatgggaccgaagaaggaggggccgtgaactatggcattgacgacattggtgaagatgatacagaagaagcaaccacatacagtttcgaaatccccgctgctggtgtcgaagtggtcaaggcccgctgccaatcgatcggatgtcctgccctggaagagtacgatttccaaggagacacagtcaaccctaatctggatatggatttgaaacccgcggcgcggattcggtcttaccaggagaagagtttaagtaaaatgttcggtaacggacgagccaagagtggtatcattgtgcttccttgtggtgccggtaaaacccttgtgggtatcactgcggcggcgaccatcaagaaaggcactatcgtcctctgcaccagttccatgtctgtggttcagtggcgaaacgagttcttgcggtggacaaccatcgaccctggtgatattgccattttcacgtcggaccataaagaaaaattcaagcgatcaactggtattattgtgtccacatactcaatggtgtcacagactcgtgcccggtcctatgatgcccagaagatgatggactggcttcaatcgagagaatggggtatgatgattcttgatgaggtgcacgtcgtgccggcatcgatgttccgaaaggtcacatctgcaattgccgcacagagtaagcttggtctcactgcaacactactacgtgaggatgacaagatcaaggatttgaatttcttgatcggaccgaagctctacgaagcaaactggatggaactggctgcacagggccacatcgccaaggtccaatgtgccgaggtgtggtgcccgatgacaactgagttctattctgagtatctgcgggaaagctcaaggaaacaggctctactatacatcatgaaccctcgcaagttccaagcgtgtcagttcctgatcgatttccacgagaagcgcggcgataagatcatcgtattctctgacaatgtctacgctctcgagcgatatgcactcaagctgaacaaggcttatatctatggcggaactcctcaaaatgagcgcatgcgtattctagagaacttccaacacaatgagcaggtcaacaccatcttcttgtcgaagattggtgatacctccctcgatctacccgaggccacttgtctgatccaaatttcgtctcattacggttcgcgtcgtcaggaggcacagcgcctgggacgaattctgcgagccaagcgccgaaacgacgagggcttcaatgcgttcttctactcgctcgtgtccaaggacactaatgagatggtctattcggccaaacgccaggcattcctaatcgatcagggttatgctttcaaggtcatcacccatctccaaggcatagacagctatgaaggactctcgtactcgacgccagcggaacgccgcgagctcctgcaagaagtcatgctgcagaacgagtcatccgccgacgtcgaacaggtcaatgatgatctgttctcgatgcgctccggcaagcgagtgacatctaagaaaggcggtgctaaacgcagcgctgccactcttagtggtctggctggtggtgatgatatggcctatatcgagtataacaagagcaggaacaagcagctcaaggataagggacatcacccgctgttcaagaagatggaacgagaccgacaacgccgcaagaaggagagggagaacgaagaataaaagctgaaatgcgctgctgtttttgctttcctttttcaggcgcgtagtttttgacctttcttcttgtatgcacccagaatgacagataccccaaataatcaccatcagtatatggtaaaaaatgaacggcaagttaaaaagatcatttgtgtcgtagaacaccctcgtccagaaactcttgtaatcctgaaataaatatgtcagcacgaccggtctagaaatcatcgccaggcctagggctgctgaccgtttcccatgacgttggtcgtcgcaacggaaaacccgaaatcgggcaatttctccgatttttgtgtttggagttaataattgtacgaccctgataggctccattggtgacttggatttcttatggcactgtctagatcaccctgacagttggacagctccaatcatcactagtatacacggaccggatggtttgagctatataaatgacatgcttccccgcgttcttcagtgtcacagacgtcatttctccaaatcaagacttataactacaaacaagtcttggcttctcttgcggaatagtattcgctgctattccagtttgcgtctaccatttcaaacagcctgctcgacttcgacgtcttcacctactctaccccttccgcgactcggcgcgcagtacagctcgtatagtcccaacaccgggaactttccccgcgttactccatccagaatggccactgctactaagatacatctgtcgccggcgacagactccggaatctacagcttcaatgtgagggaagacaccgcgcggacagtgagcgagctcttgcaggaagatctggaaatccaccatgtcttctttaataacgaacggttccatagtatgtacttcccaggcgaagccctcaccaagaatcctatctaatgcaaagacagatcacataccccacgagctccttactatctatgctcttggtgcatcaccggaggaggtcaagacttgctatgaccggaataagcgttatcagagacccgcccttccggcaaaccaagatattgtccagtctatgcatgatgtcgctaaattcaaggagtgctctgggaaggaagaaaattaccctcattacctagctttcttccagcaggagattgacgcaaaaggcgtcccagatgttctgaatgagtatttattcgctgaagatgagcgagcggagagtatgatgtgtcgtgtgtttgccggtaagtatatcttacagttgtactgggctatattatattgtatgttcctcgggctaattcattcaggcctcattcacccgttcatccaactcggtttcgggattgaattcaaccaacctgctattgtagcccaaggtcttgctcagatagcagtgcacgatgactggctgggtcgtgcctatttcctacccgcggagaagatggctggcggcatcggaaagccgggacagaagtcgctgttccagctcataaatgagattcgggcagacaagacccttgttgagagtgttcagtggtctgacagtaataagatcaaagatggagtgctccacagagcgcctgagcagatgttgaagtatgcttctcaatttactgtatccaaggatcaggtgcatgggcggttagcggatatgaccaatacagtcggtaagtctagtcttggaagcgcttgcttgtgttatttgaatgatgcgagcgagaagctattgctgaattcatctcgtcagtctactataccagtgccgcccagcgtccgaccaaagagatgtggcttgatttcttcttgatccattgtgtcaattcctctatcttcttttctaagattatcgaactccctttcatgactcagcgatccaaactgcgcatgctggaatggaagggacgaatcgagctgctgatgtatacttcgcgtggaacgccggatctcctcctggatgaggtggtcaattattccccgaaggacaactggtcacagctattcgcgcgtagcatcgcccatcccgatgacgatggacatctagccaagctggtgcgggctttggcgcacggccagaaagtctgccaggtatatgagagaacacatcccgagatgcggatcaagggaaatatgtggcttagcgttgggaatataggtgagtatcaaaatctccattacatatctgtcaccttacctaactgctcgacagccgttgactctactgtcgaggagggaggtagaccaatgtgggtccgttctactggattcgatgaagcatgggagtctcaacgggcgcatatctgagacgggcaacacgccttcttcatgaggatatttatttcattgtactttccactatcccccagaatgttaccatttaacgctaaattgatataaaacttccccatactttagaggttgaactatggttcccggctctagctgcagtggggctctaaccttggaatgacgccagcggctcaacgtgattgtgcttgtatagggtgcatatgtagtatgttcgaacggttttcaagctgaattgaaccggaatgggagaagaacggagagtatcatttcttgcaaaggccagacacaggaatagggagaatcgtgtgtagaaaacgaaagaacgaaggcaaaaacattggggatcacgtggtgtcaagtggggctccccaacatgtattcgattctgcatctcctcactttcccccccatcagtctaccgaggtagaatctattgttattctccgatcttaacataatcatgggcaacgaagacagcaaggacgcatcaacccagaagaactggactgatgatgagaccaacccgttcgttgccttccggcgctacgctgatgagcaggtctccaccatgctgcaatctatcacgggcctcccttcgatggtgacacagcctcaccacggccactgggatatatttgaggataatcacgactataagagtcggatggctcgtcaacgaaacagtgataatacgggcagcaacaattatccaacagaacgagacagcggaagtggttatccggatggagatgatctacgcaactatggaaagaatgcacgaccacgccaactagagaacgatgatctgtggaagaaatggtctaatggaccatccgagctgtttggcctcgattctttcttcgaccggttcttcgaggaccgcttcttccctttcgcatcgcaactcctacactccggccagagccttctcctccgggatatgtttgaggacaccgaatctccaacctggccgattgggtatatcctgttcagcccatactcgcctctccatctagaacgtcaagcacagtaccaagcaaaccgtgagaagggcgttttctcttctatcatgtcgtctttgcatctcaactccgaccgtgacccctccgaaccacagtggcgagaagccttcgaggatttaatccgactcgagaacgacaaatcgatgctcgatcgtaatgccgtcaccgcaccagagtctggaaaggattggctacaagggcttattaaacgaggcagcttgggagataagtggaagtatgttcctggcagagatggccagccttggtcgggcattacgttctctagccgtgcaggcccagaacaggaccagtctcggtctcggtctctaccggagaaagagaaagaagccgtcgatacgaaggaggctgacagcgagctggagctgtatgagcgcttcttgcacgatattgaaaatcgcgaacgcgagttcttccgcggggtttccgaaagccctcttctgcgtctcctactcgaggaccgacggcgacaacaggaggaacttgagaaatacagacgcagcgctccaaaggtcgaagatgagcacagcagtgacgataatgagaattggatcgatcttgtgtctggcggaaacaagaaatcagttcctgaaacacccgaggatttgccgaccgagatccagaccaagccaacaccaaccgaagctgtctcggaaccagcgcagcctcgtatcatctctactataactcgaacggaacgtgtccagcttgctgatggctcggttcagagcaagatcgttaataccaggcgttttgcagatggccgagaggaaagtgacgagtctgttgaggtgtctcatccccagaaaggttccaagtctgactctgacacaccgaagaacggttggttctggaaagactaggactctgtttggacaatatctacgattttaaaatgaccttctctcatgtcttaactcttcagcgttcgttctctcaatctattcttttttatctctttcaatttgcttcccaacctgcttctcggctatgcatggaaaagtcaatcccatctagtttgatatctcttaggaaataatgcaagcatggcggctaccgtcggtcataattcaatttctctatgagactaatatcaagcaaatctaagccaagtacactaagcatcttcagaattttaaaacccactcgatctacgtctaatcagccttgacactcttcttccctcccttgccagtagtccaccccctagattcccagagtttgacgttatcttccatcttcttgtaagcccaagtaaacggcgggtctacacaaccaaagttagcacctgccacaaagccaataatgagaaaacatacaaaggaactgtctcaaatcatgacgattatcctcgggggagtactgctcagcgtggtagctaggcgtgagaacagtcatcttatgtctgttgatggagtagtagtagaagaagtggcgggtcttctcgtagatctcgcgcgggctgtactcgttgccccacatgcgaagcagcttttcgtacatagagtacgggcctagcttggagaccttcctcaagtacccgaaaacgcccagctgcacgtacgtaacgcccatgtcggcttcgtcggattgcacgtagtcgtgcgagatgggttccagctcggctgtgggtgttgcgtggatgaattcttcgaggatcgggaggtcgaagctttgaccggaccaggcgatgaatttcttaaggtcgactttgcttatggagccgatgggattgagctgttgttttggttagtctggtataaagtggggttgaacttgcgggaattgatgcttacgtcggcggagctggcatcgtacttggtgagatagcctcgcaaactatatgggtttagtcagtcaccagaaaggaaattagtgtatttatgtggcgtaccattctgtaatagcagttagtgaagatgctcaacaaggtgcaatattcgggtgagagacttaccatcaacgttagaggatgcaagaacgagcaagccaccacctccagggcgttgacgcacagtcggcaataaagaggcaaacagatatgagagaaccattctcatccgagcctgcacattctgaagcgcggcattctctgcgaaagatccaccgtgcattttgaaacgaggctggaagttagtgataacagtaaagagattcatgatagaagtgaccacagtatcgaaattgaagtcaatgtggtaagacccaatatcggaggccagccgagatgctctgtctcgtgtctccttgcctgagttttgggtgcccatgtagctggtatggaagatagacctagagaaattggttaatgttgccccagactagataattttggcctaaagaatgatcacttggaaaacttacttgcaaatttcttggctggtggtaggaagccaatctgagtcttctggcttcgcacacaaccggcggacatctttgatgacctgctggttcccttggcgcactgctttgagcacttcgcgagtcatggagtgcacaatgattgccgtggcacagctgtcaataccaccgctcagagggaggaagaaaccggcggctccagatctccgaaggtaatcccatagccagcaggcaggccccagagcaatctcctcctcggcaggatggtaccgcggatggataggcagagcaggcgcgaggttaggttcggcatcttcatcccggtgagacagcctgatatcaagatcaaggcggacaaagggcgattgcttgctggcttgcattccacggcttgcgctgcaccggtaggtgcggacttcttcgatgtcgaccgttgcagtgacaacttccacatcgttcagagagaactgtgaaccttgggccacgatgtcaccgttgacgacaatcatagcacatccgtcatagtacagacgatcgccatcgcagccttgttgattggcgtaaagatagattccaccactctgtgagctgtaagaaaagtgctatgctattggagcgttgtttttcactcaccagtttggtagcctgggtgatcagattgacccgagtgttaagcttcttcagttcgtggtggctgcccgaagaattcgagatgatctcaacacctattttgaattagacaatgagcgcggccatggatattgatacttaccagctaggccatacgggatgtgagggctaaaatcgattgttagcatccacatccacttagagagttcaacacctacccattaggggtaaacagctcctcacacgtctcaagacccagacacgtatctcttgtgctgataacagcatcaccaaatggaaccttgtactggcctgtgatatctccaactattgattccaaatagtagtcatccacctcctgtggacgttgccatggcgtaaagtggcggtgctcgcgatagttgccatctagattagggattgatattagaaactattctccgaagtataaagagcaattgaacgaaccgttcgcaagccacatcttcggcctaatcaggataatcttccggttgtggaaaatgacacttgagaaaatatatcaactaatgctatatcagtaatatcgggaatacttaccgacagttgtagcgcacattgcgatggcgaaccggcaatcccacatcaaccacaatatcctggcaatcgggatggtcgatgatgcgggcgaacatttcccatgcgtgcatgaaggtgtcgccctcaaggaaaccgtccagaactccatatccggtaatctcgagctccggtccaacacgcaaggtagcaccggcagccttggcttgcctgatgctctcaatgatacgctccgcgttgccctcgaagtcgagagcccactggttaagagagctagaacgggttagcgcgggacttcctagtatcaaaatagtgaatgtgtcagccttaccatgttgctagagtgactaggtgccccatgattcctaatatgactgagacgtctgtgtcttgtgctttgcacagaggctcaccggcgataagagccgaaagaatgaggtcacgtgtgtggggagctcagattcccccgcttctgtggtaattacatgactgtacattattgtaatctattcttctctcagcactgtcggcttaactccgaccaaaaaaacatgtaatcagtttgtaagcatcccgaggtcggctgctgattaatgcgatttctccgcctgtctgtgctggattccacgttttgatattttagatatagactcgttattgagtgagaattttcttcttgttcatatacttaccattttagacattccttgctggcgatttggctcttacagaatgagcacgactgccctgatccccgccccggctcatacgctcgcggattcaatgttgtcccgacactttggcaaagagacggttaattacttctccagtaaggatgtcttagactcttgtatatgaggcacagtagggctaaagtatctctaggttctccaatcaatcgtctatctttcttgcgctccgaccacccgttcctgtccagtgctctaaagcacccttcgacccgatttgtactgttgaacaacctagcgcccttgactccgtcaccgtcgcagctatactatgccaagtatgacgatgtacgcaagcttgttccccaggatatcttcgataaatccgaggaagacatgatcaagaactatgactcgcgcaagacacacccgacccttatattcctcggactggacgagagtcacaaggaagggggtctgacgtacaagatctactctggcacgccgtattttgcagtcgacgtgacccccaagggacctgaagagcagcagactgcagcgaaggatataatcgctgccatggaggcgaagggactgtcattcttccaaacacgagttgtcatgtccttctccgcagatgaaggtatgaagatgcgatcttaatgtctgcatctataagaggaaactaatcaactcgggatagctgctatctatgcacaagcacgtgcgctgatggactggaacactcgcaacaccttctgtggtacatgcggccaccgtactttggccgtgaatgcaggaaccaagcgtgcctgtccaccgacggatgttgcactaggaattgagggcaagttggaagagcggccggagtgcaatacccgcactacgctgtcaaacctttccttcccccgtaccgatccgactatcattgttgcggtggtctccgctgatggcaagcgggtcctcctcgggcgctccaagcgcttcccgccagggtggtattccaccttggctggattcatcgagccagcggagtcaatcgaggatgccgtgcggagagaggtgtgggaagaatccggcgtcactttgtcccgcgttgttatccactcctcgcagccttggccgtatccggccaatttgatgattggtgctattgcccaggtcagtgaccccgctcacgagaccatctctttactgcatgaccctgagttggaggatgcgcggtggtttgaaattgaggaggtgcaagaggcgctgcgcattggtacaagtgacttgagtggtccggctggtccagaatacaagggcggtttgcgattgccccctcctacggctattgccaatcagttgattcaggctgctgtcagcgcagagtattttgcggcagataagcagtctaagatgtaaactcatacttcttatgaccaccatatataacattgatgaatttagaccttgaccatgtctgaacaccggtagtatctatgtaaaagccctgttttgaattgaaaggctcacacggaatatatcctaattctaagtaaatatttgcttcgatgattccacaccttccaagctttcgaaattactatcatattgtatttgggaaaagacttcatgcatccatcatgagccgaaggaaaacaaatatgtttcatcaaacttccctttgacgatatcaacagcctattgatgagcattagaaaaacagttcactatgtgtggactgtcagcgggcttactatggcatctttgaattccatgacaattgcttcttcctcattgatgaggtcatcttctcgcacggtaatatggtctttatcgtatgtctccgctcgatcaaaatctagccaaacgactctctgcgtctgaactatccttgacgatcatcatgttccgtggttttgaatctcgatgtctcactagtactttatgtatttggcgaataccctttaggagattgttcacccgttgcggcgtgtaatttcgcaagttgatcatccccagactggtgatgtactcgaggaatatagcgctaggcgggtattcgtcgtcgagaaacttccttaagtgaggctggcataggctagggtcaaacttcctcataaaacctaggaagtctggcacaattccacgatcacaaagtccttgctctttcagccgagtgtaggtagtggcttcaagtacgtgaatatccaatccacgaccttcctgttcgtaatagcgccgcggtcccctcccatggtgctacttatattagcaagaatatctagatgcatagtaccttgttgctcgacttaccaccttcatgatgcaagtttattgccggatctcaacgaaaaatatgactgaacatcatcaagctccggcatggtctcaggtagaaatctgtttttttttgaaggtagttggagttgtttgcagagagcattacagggaattgtaggtgacttggccccagtattatgcacgccccagcgtttgatgcgctaactcagaagcaccaatcactccacactcttatccatctggcaagtggttgctaagtatcaaaatcaaagatatctactattcacttgatttgctgtagctcttgcagattgatgtttaccctatctgaaacaaaaaactccttctaggaaagattgtatattgtatattctaccttcttacggttctcggatgggcgctctagcgattcgcagaggaaatgatatgatcatttcttgatgttgaggaagggatgcgcgattaattgacgagcggttttcctctcctctgggagccaggtaagcattccacggacaaaagacagaaaagaatctcgctcattctcttctagagatgggagtgtagcttctagacttcgggcaggaatcaagtcatcgtagaggaattttcctaggcatattagcgaaaaggaagacaaatttcacttgtatgattaactacaaaccttcgtcactgaagaaaggtccatcaaagtattctcgtgcattgctgcaggaaataccggcttcattactgataggatgaggccaattgtgctgtgccatggcattttccttcgcaattaatttctccggaggaggaccgagaagcgcgatcatttccgctagatgtgacttggagtcgtatcgaccatccgtattatggacttgctgaaatagctctgtgcattcaataatattccacatctgatttgagggataagccttgttcgtgatactcagacagagaaagaatcgggggagacgttaccatgacaccaaaattccaaatatctgccttagaatcccaaccacagccaagaattacctccggtgcacggtagtggtcaggctgtatgggatatatgccagtttggtcccctccggcctcttttctcggagaatcatagcttagacgtgtcgataatccaaagtcagctattttgggtaccatattcttaaggtttgtccaatcaagagccccaaaatcattgtggcagcgataaacggtacgaccggtcattatgtcgactttgtattgcataggtacttcgttgatctgtagtttaacaaatgcggaaagaacactttcattttcaaaactcataagaatattatctagtttcaaatctaagatgatttcattaaattagttctttatatcataaaaaatggaaaggaaatggtactcaccagtatgaacgactccacaatcagaatgaagaaagtcgaggccaaccaggaggaaaaatatgtaagcttttacgatcggtagagggagtctccgatcaacgaaacgtcgttgtagaatccagagaggctcgcgcattggtttataggctaagcataggtggtttccttctgtactagccacctcgaaactctccagacaggttcgcacgatggcgcggccgcgatgagattgattctgccgtgtaatgtgctcctcaatgtctctttcatggtaaggctcgcgatcacggcaggagtttattatttttagggcgactgttcgttctgactgccatcgaagtcttcatcaattagttatgtgataagagggcaaaagtggaacggcaagagatagattagcgtaccttgtgatatctcgagctagccagactgttgatcgagttccccaaccaatcttcaccagtaattgataatgactagcaagaatgtccccggggtttgccgagtaaaagtgattggggctgtatccgggacagatctcctcatccacagcttcatgctgtggaatggggagtgcggacctggaaggcagatgccagatcggctttctcgcgagggagaagattgtgcgcttcgccaattgattcattgtttctagagataaattgagagacgttcacatctcatcaagacgtgctgcgaataggaccttgatatatactgggccaaggatatctgcacctgcctagttagttaacttggtggctggcaagttgtgatgactaatcaggttattttcttggaaggttccactctgagagagttaaggtgtgctccactaaatgtctatattgtggattctctacggagtaggtacgctccgaggatgatcatatttaactacggagtagtatatgtctcttagttacaaatccatttactccagccaatcatgcaacttgttactcgactgtgattttcggagtttttgggatgatcctagttatcaaaggaaggacacggggttgggcagagatttaagggaacgttgggaagagagcacgtgaatcgttgatcccactaccccgtcaacagtgggacattcctaatttgtactacatacagcatagacagtaggtatgtcgctttgaagtttaggcatctgaactggtctggcggggaggagtccttaaagatcatgcatcatgcatcttgcactgctgtgattactcgactccatgtatgcagaaactgccgtaattttgcttcatgggcccgagtttacgagactgcgtgaatttgaatacacaggcgggctctccaaggtgtgatcttcaataaacggcggagtacccccgaagccatttgcatcatgaaaaaatgccacatctttattgatcctttcgcgtgttcccggatgaggtttgtaagcaactttcctgcggctgagatgggccacgacgactggcagtttgttctgttcggcaagatggcccagtgtgggatcccaataattgttggatatatcgaatatgaaaagtgtgcagactcgccatttctgtatcgctaacagccttgtatccggtgtatcgtcttcttgcacatcgtaatctgcgtattttcgctgcttttctagtgaggatataatgaaatagaatgcagaggaagtttgagaaatatatacccaccgctttcgcttctcataccgctttggtagtggtatgagacgtatacatttgacgacgcggtgtaacaaacttccaagagcacatacagttgcctgaaggtttcgaggagcctacctgggtaggtgttccgactctgctgattcttgcaaagtctgaagcaggccccactgttcagccgcatttcagccctcccagttgagcctcatcccgtaccagcaaatgaacctgtagtgtccgacatagcagatcaagaaaacaaactaaataacaaggaaaccatctatatagaagtttatcctttatctagtaggtactagccatggccttttgcgggcttctagtcgcgatcacaacgagaatgtcgctgctgcaatgtcaatggctattcgggatatggcgtcatcttcagacctcgctactacgactggccaggcaagaacgaacagaacacacgtttccatctattggcagtaagtcataattattccggtaccggtaaggctattgggacttgtcacattatcagaaccacttggaaaacccagaaagctatgattccccctttaaagaatgagattttgccacatgatgatcggaacgagaaagccaagagatagagaacgggggtggaagactgcgaatcccttgatcgttcatatgtattcttttgttttactcggtaggtacaggtgaattgtaacagagacaccacacaagaatcaagattttaagacgaccatttcaaatattggcatacaacgtgccatcccgtaattcgtgaacactgctgttccgactgtttggggacccgacctccgtataacgagtgccatcacgcagctcatggatcgtgattcttcgagtgctcttgcgcttgcgctgcgagcctcgcttagaatctggggtccctgactcacttcgcacttgactgcctggtgtcatatcgcgctcctctctgtctctctcaatagctgcctggagcatatggtccgcaaccctagccgagccaatttcatcgtaccatcgacgtaagccagacgcgtacgcacgttcctgcgagtcatattcgacaggaggtccgttcgtctcggcctcgggacccgaaccgtcgaatactgcccacgcgctagtatcggcactgacaagcatcatggtgtgatcgaaactctggaccttgaagtcgcgtaagagtatggcgttgccttctaccaatgttggcatcgaggccttgtggcgccggaaaatttgagcatgaagagtcatgccagccatagatggatcggtaagttcaatagtcacgaaccagtcttttgaactagatttggcccgggttatcggcgaagcttcatgtacgattgagatggtatcgactagagcattgtaatgatcaatgagtgtggcaagtggtgcgaagtaggaaagcttgctccgcagtccagaagcattacggtcgggaactgagggctgtggaatgggaactgccaatgtgttcggagattcaatcacaacatccatagagcggccaggttcgggtgttgctgtgggttctgcggcttcaacggattccgaaggagccacggcatcatcatgtctgtcaacgtggatctcttgtgtgttttttatgagtcccgccccgatgccatcgtcttggtctgactctggggagtcagccagcagcaaagttttatcaagaccagtaggggcttcagtttcttcgatcgtggatgaagcttgatgttcaaaatcatgaatcagttcaagcggggatgcatttttctgggtggggtctgatgttgagggttgtcgcttcaatggagacgtagtggacggcgagactcgaccgccaagtggctcaggtccttcgacagttggctcttcgacagtcggctcatgcttcaacgggaaatcggctatggtatttctagcagacgaaggaatatgcaaatcaaattgtccgtccccagtgagatactgcccagcatgatttttgccttccaaggatggaccttgatgatgagattcaggcccatcaagcaagtttggatcagcattgcctgattgcccctcgttatagtctcgatcgactggcactcctatctgtgcgtgagggttggccacagtataatattcgtcgttgtcagcttcttcgatgagctccgcatgtttaatttgtttatcttcatcttgctcaaggttgggtgatgccacttcagatgcacggtccgtttcatagtggtcttgggacgactcatcatcatccatatcactttcgtaaactcggtcatattgttgattgtattcgtcttccccctcttcctcatcttccctgtcttccctgtcttccctcgcttccctgtcttcgctttctccaccgtattcactcctttcaatgtcttcgctctcttcactgtcttcgctttggcgttcatcagtatcggaatcgtcttccactactccgtgatagtcttttccgtcaagataccacggctctggatattcctgtacaccacttgcaaattcggctgcagctggagggacagcgggatgttcggattcagagcagtatgagtgatcgtttcgttctgctgactgcgaagctgaggctaccggatgattggaggcagactcatcatcactgtcactgtccagcacgattacttcatggcttcccgcctgcgagggcagcttttgttcctgctcaggcttttcaccactagattcaacgacaccgaagtcatcttcgtccaatcgtgattccaaactaggatcaccatataaatcctcctcgtcctcttcagattcacattgagaatcgtaattttccactgactccgcatagtacacttcttcgtccttttcttcccggtatccttgactgggtggacgatcgacatccttttcgctttctttctcctcttctgtatttttcatcttttggtattcctcatctcgagcggctatcatttttccgagggcatcgatcgcatcctgatcagacgtgagccctagttgtggatagtggactaagtgagtctctggctcaggatgtttctcatcacgagattcacccggatattgaggagatcccaaattgtcgctggcagtttcgatgccaagatcatgttgagcaatatctgatccatcgacctcttctgaggattcgagtgattcatcttgcccagcctcctccgaaggtgaggatgatcctgagttatcgcgccataggtgactggaatcaacgagatgttcttgatatgtttcatctgacgcctgagcttcgtcggtggcattttcggtaacaacatcagcttgagcggcaggtgattcatctttggtattgggggagtcatccaatttatcttccgagtccgaaagtcgtgctggatggtcgtgggataggttaggatcatcaaaagcagaatactgctctagttcatttgacatttgagctttgtcgccagtagtatcaatggccatgtcagcttcgacgacatctgacccatcaatagctatggagtcgattatctcaactccctgcttctccggtaaatcttctgagcctggatatgatgccgaatcattgcggataaacccagcatcgaagacatgttcctgctggacggattcaacatccggatcaactgtttctagatctgcgtgaatggaatcgatggtgtcggtatcatgggtttcgatggaggatgctgcgggcgttgctatggtatccattcccgcctgagcatatccaatctcttggaattgtgtgggcgcggtccatggcaggaaatagctagttgagccagcatgatttgatacgagtggcgaaggaatcgggagccccggagaagggatgggtcgaatctgcggcgtatccgttggcagatggaaaagtgtttcatgatcatcaacttgtccatgagacacaacatttgactcggcggcatgtctttcgaggatactcccggtcaattcaagagaaggcttcgcaaacactggaagtggctcttgtggtgcatcctctgtgtatgttggagcttcgacatcatccgtcatggaagcctcactcgccgagtctgcctcgagttcttgatcgatagattgattcaaagcctgttcccaatccacaggagcttcttgctcgcgagggctttcgggttcattgacaacacgccaatcttccctgtgcaagctgtacctcggcttttttcttcctttccctggcacaaatccatcttcttccgtaaaaggatcgaaagcggaacggattgttcccccaagtggggttcgagtagaattgaggaacataggtgatccccagggccgttcactagaaggcaggtcgaattcgggattgattgatttgccactaggggttgtaggcgatgctggttcggtttcatgcggtgctgtcacttgcggctcaaccgatattatcaacggaggttgggaagatcggtagatctagataggcagcagttagtcaccataagacacatatcgagtttgggagcaacatacctcgagagatacgccattctcaaagtgcgcatcccatgcgacagacctccccggggttttctgggcgtcttcgttgctgacaaacttgatgtctttcaaggccagactaacggtatccccaattccgacatgcgattccgcgaccctttctgcgacgcgtccgtggaacgtgaccttgatttgtcctctggcgcccctcaggcggaagtccggctccgctaatagaaggctcacagtcttgatcgaagaggagtatggccacacaagtgctacagctgcaagaaaagacttctcggccaatttctcaaggtctggggaaagctgagctatcgggaccctggtcaactgcgccagcgcattcgacgcgggagactgctcaatcgcgttcattgcgccggtttgcccacgcccgactgacttttgttttatcaagctggcctcatatcaaacaggagtaatagtcgatataaaataagaagggtaaaaatgcgagtatataaaactgggctgaaaggaaatgaagatgaatatttcgtgcaacaaagaggaccttcggcagctgcagctctgttgggtaatgttacagtaaaaacagcaagaaaagggcgtaatttcggtattgggagaacgaaagttaccctcttcggttggattgtccatgtccaataagacttgctgattggtcgatcttattatatagtcacatacggaggattatgcactgcttttgaacgtgaacatagtgaaaacattcttgtagtgtattcttcatgtcgttatgggtctacgctataagacaccggatataaaaagcagctccactatggcgaaagcgcttggcatcctccaaggtcacttcttttttctcgcaactcaccttcgcatttctgactacataggttaccaggaattcccaagagctcgttgaaagcatgtcaatcacaaatactattcggcgagtggctgtcatcggcgcggggccctccggccttgctgcagtcaagtaagcggggttgttacacatccgccaacatgacaatgctgaccgactcagatacctgctcgccgagaaatatttcgatcaaatcgaagtcttcgagcaaagaagctccgtaggaggagtttggaactacagtccgagctcctctaaagaagggagatcaacagctgtcccacatttaaccccccatgagccagtcgagaagccagtgtggatcgatcacaatggggggcgtgaggcaacattcgtgtctccagtatacgatcgactggaaaccaacatccctaaggagttaatgcgctactcggataaggccttcccattggaatcccagctcttccccaagcatcggacggttaaacaatacctcgaagaatatggcgaagacgtcaaaggcctcattcactttgagacacaagtcttagaagtgaaactcaaggatgaaagtctgagcacttggagtctaacatcaaagagtcttcaaactggcatagacacaacccacacatatgatgctgtggtggttgcaagcggtcatttcacggtcccttacatacctgaaatcctaggaatacaagcctgggatgcatcatacccaggtgctatctctcattccaagttttacaactccccagaacctttccaaggaaagaaagttgtggtggttggaagttctgcttcaggcctggacattggttcccagatcaatgaagtaagccaaggcaagctgttggtctcccaacgatctgaatcatacttggctgcatccgcaaatgacgataaaatcatctgcccggagatagtcgagtttcttccttcgacaacctatgacagaggtataaaatttgcggatggtcgcatcgaggaacatgttgacgctgttgtcttctgcaccggctatttctattcatatccttttctatcctcactcaacccaccggttgtgacccacggatggcgaacaatgaatgtctaccagcagttattctatatagagcaccccactctcgtcttccccgtgctttcgcagcgggtgattccattccctatggctgagaaccacgctgctgtcttctctcgtgtatggtctgcgcggcttacgcttccaccaaaagatgagatgaaggcatgggaagcttccgaaattgaagccaaaggagatggaaaggatttccatttgcttccatttcccatggatgctgactacctcaattttctctacgactgggcggagaaggccaacccacgacctggcctctctaacaacggacaaggcaaacttggtactcggtggggtgagcgggaaagatggatgcgggcccatttcccagaaatcagacgtgctttcgtacaacggggtgacgcacggagcgagatcaaggatctagcggagctcggtttcgactttgaagagtggaagaggcaacaagatgatcagtgatgattatggtacaatttcacatctcaaccagtacctacagcattaacggtgatctaaatcaattagaaatccattagttttgcatcttttgaatcattaaatagatatatgagcctataacccttgatcagcatgtcactattcccaaatattgtagatctaccgataagcgttatcacgtgaagcgggctcactatccgtccgcccgtcgcgccatgcgtttaccctctttcatataccgtcacagtgctttggggaagtggtagatgttgcccagaattaaaaattgtatgtgtctcggatcaatgcagctcatatgagcttatattgagtattgaacctacgctctcatttcaccccgtcatgttatccaacatctccccgacactaatcgcccgcacatgatgcttcgggagcagcttcgctcgccgaaactccaaagtcaccacagaaagaatactgaccggccttcagctacaattgtggttattagcgacagcagtgagagcagcgacggtagtgacttggacgacgaggagtggcctatcaagtgtatcctccgtgaaacagacaccgagtatctcattgattgggagggtccatacgatccgacttgggtgagttcccgtggcaatattggacataaaaggcatcaaagaaatgattgccgagcttgaactaacaaatgcgcgctttgcttgtttaggaacccaaagagaacgcaagtgagcttgctatacgggtctggaacaagcaaaaagctcggcgatcaagtgcgctagatcggaagtcgacaagtaggaggattactcaatcgcccagcgtcgtcgaagtctcttcctcctcatcagaagagaatacaggccaaggggacagctaccgcactaccttcgacgagactgaggacactgattctgataatcattcaagagcttcctcgtcgctatttgtgcaacaagacaacatttcagagatagtagactctcttcaatctcagtacattgaagtctcgggctgcttttacgggaccgcctctctacctcaatctccatctacaaaccctcgcctgcaagccgacgaatacatccctgagtcacctattccacctgaatacccgcaacgaggtgagtgggacgacgtcaatacgcagcagcctggcccggtttgtgaccaaaaggccgatttaattaatagatgctcatcgcatcgacagtactctgcggaaatcaacaacgtttctgaattattatcacacccgaacacgccgggtgttggactgagctccaacgtctccgaaatagccgagacgcctgttcagccatcaagtttaggaaccgatttctcgtgccccggctcctatcctttttataataccccatctcacaacaatttgacttttggctcgtgtggctccatcctgagaggtagtttcacatgcaaaatcaagttttacattttgttcacattttgctcacattctcacagactgcgtgttcgtccggtcaacttatctgagctcaattccggaaacagtctgtcaaaacctgtcacagcacccagaagagctcagtgctgaaggtttcacccgaccaatgccatcattttctaatctcgtacaagaagaaccatttggcgaaatcatggaagacaaagagcccaagccatcagatccttctctctccgctgccactttggaccgatacggacaattgccagggtccactcccacggaaatgatacggaacgcctgggccaaactcagcgaagcgaatcaatcagagctatcgcaaccagctaacgctgtccaaactccgtcttccgtgggggatattgaagcttcgatgcctgtgtctatccccgaaacaactgctctgcttagcgtcagacccgacacagactctttttccaattcccatactgcagtccaccatggtcattctgaacctttactaccaccctcggaactagcgcacgaagctcatatgagccaaccttcacttcaaactattcatcccagtgcgttgaccgtcaccgacatggatgaggtggttgcgcccggttctgtccaccttgggccatctgaatttgctgtccctcttccgatgaatgcacgtgtgaaggatcactacgagcgagtactatcagatgcagctacatgcatacgcaaattttttgatagctttcagtcgaatactcaagtttcggagcctgaggcaagtaggatgtttctgggatatgattcgcattgcttacattgttttcacagcgagaggttttgcattcacatatgcgggaggtcatcgcccggctgagcaatgttgcaacctatccagacttgaatttcgccaatcatttgaaaaataccgaccctgactttgcggaagaggcatcctgggcggaaatgtccagtgcaaagtttttcctacttggtcatttcatgaagattgtaggtacgcacgagctccatctgattctcgctgtacaagacgagaagaaacagggagttctcgagcgttatctccaagggaaaggttttgcatacacccgaccccgtgcagagatgggtagcaccttggaggtttccctagccaaggggtcactgagctttggaattcattcgagtgagaccgcccgtgaactttacaagccgccgtctgctatttttgccctggattcgtatttcaaacccaaaagcccgttcatacagcatctccgaacgacttatgcccgaaacgggagcttgcttcccgtcatttggtttcttgtcgccaacacaagtgaacatatcgagcgttgtttgcccgagtcgccggatcctgatcgattgcgtttacttgtgcactacattgcccgtttccatgacgaggccggtgagctccaggatgatgccctcggcgcgtctgaagatgccgaagagattcttggatatctcttggatagtgttgctggttggccattgcctaccattaaacctttgaaccttgtatcactggaggagttagagtgcgacagctcttcatctgacgaggcgatgccgccggcccataaacgcacactggtaattataccacatgttgatgtatttgaattcagctaacgctttggggcaggatgagaaacccgatgaacactcgtcgaagcgcgcacggattggtacccaagaggacagccagttgaccgagtcaactaagcctcccactcaaacgttggaccgtgatttgatctcattggagaagaatattatccagatgaaacacattcacgcaagtgaaaaagcccagctgcaggctgagcttgctcgggcaaattctggattccgagaaatggagagagctctgggtattctacaacaccgttacgagagtcggacgaaggaactccatgtaactcgccaagagcgtgatcgtgtggttgagcacaagccgtctctagaacagcgcgtcgagaaacaaaaagagactatctctagtctgaaacaagaacgggcagagctgaagcgcgagctcgacgaagctagacaggcactcaaaaatggcggtggcagtaatgctgaactagagatggcacgggaggaaatccgtcgtctgaccaaagaaaattcgaaccttgagcgcaaagctgagtttgagaaaaaccaatccgagtacacccgagagcaataccaaactgcgtctaccgcggccgctcagtctggcaccgaaaaccgccatttggccactgagaatgagagactaaagcgcaaggccgaaagcaatgccgtgcaacttcgtgagttgcacatgaaggatgagtcggttcgccatctagctaggattgaagagctagaactaactctggcttcgcgcgacgaattcctacaaaggaaggaagaagagcttcgtgaaatccggaagaatcgtccgtcaactcgctcgactagcactcaaccacgaagccccaagtgggcgggcagccgtccgaccagccccggggttggtcataatggtaacggtaatggcggtcatgggggcaggggcagtgcgctacgatacagctcagaggtgcctttctgagggtattacacaatatcccataaactttcatgtcccctgccattgatcatgttcttgccactcatttttcctacaccaatctatgacgtctatacacgatacatagacgggggatttgctctttgcgaagcatttcactatcacattagctagatatttattcctttcatccgctcattacgacattgcatcttcctggcgtttcatccattgcgactccacatttacccatgagcgattttcgttttgcgagagaaaaccgggtcttggatgcaacattatctgagtcttgtcatctccaagcaagtcaactgtttcatccgattttcatggtagttcttttcgccatagatctaatgacagacatcttagtgctttagtttttttgagaaaataaagacgattcttccaaatgtaaaacatcaatctggatttcgtattcggtaattaaaatgtaagcaaaaagtagcaaagggccgcaaaattatggattatgtatacactgagataataagacagggaaggaaagaaatactttgtcctggacagcagcatacaaaatggacagataagtagaagagaaaagagcccatgtctaaatctcctggaaatagacatgtcacagtccccgaatgcaatacgtttacgccgaagccatagagttagcaatgaatgtagccagctccttggccttctcgccacgagtcatagtgaaatgattggcatcctccataacggtgattccgccgacatgattcgggccgacgagggtatcccaaccatttggaccgagatcagtgcggttgttcaacaaccagagcatctcacgagggtctgggctaccatctgcagctggtgcagggcgggcatcacctggcttggagcagacaccatccttggcccagaccatgaaggtcttggggagcttatcggccagcttggggtctgtgtgagggaagggaaccgccttgtaagcatccagggaatcgatgaaagccaggaagtgagggagaagccatttaggtggaggtgccttgccctctccaaacagtccgaccgtatcaaagaagctgtacaggcggcgaggcagcttctccagtccaacggggaagggcgaatcaagaagcagcaggcgctcgactcgctcgccttcctcgaagatcagttggcgcgcggcgtcgtacgcacaaataccaccggcggaccagccaccgaagttgtaagggccagtgggctggcgacgccgaatctcagcaatgtaaggagctgtgagctcgtccaatctggccttgagattctcaggggtgcgcatgtatgggcagttcaatccatagacacacacatcgggagaaattccagggatggaagcataggaggtagcagagccagagccatcagggaacaaaaacaaactctgagtcgctgtctttgggtttccttgcaggaggattgaagtggccggcgggtgctggggggtagtgctgggagcgaccaccggggctcgaacagggatttgttcggggaatctgattggctccgcaggggctggcttaggctttagacccaaggtagtctcgatatcatcgagtgtttgattctcaatgaagaactctcccgagagatcaagatcaagatcttcacggattttaccgagaacggtgagcgacatcaatgagtctaggcccatctcagcaaggttcgcatccccatcgagctcctcgggttccacaccgatctcctcagccaagattgaggcaatctgcctcatgctgtcattttgctcctgcgatccatgtgccatcggcttctcatttgcaggacttggcagaccactgctgtttggactcgacaagtcggtcgaagatgcggccgacgacatgtcaccttcactgcttgatccgtcactactttcactagggctcatttgagctagaagatttttgaagtctttgacagttggattatccacgaagatagtggagtcaagatcgagtcccatgtcctcgcggtatcgcccagtgacagtcagcgagagaagggagtcaactccgtaatcagcgaagttgaggtcatcagtcagctcagatgccgaaagtccgacctcttcagcaaggattgcaagagcacgcatagtcagacttggcattccagatcttggtgaaggggcagcctttttggcagagccagtctttgccttctcgatattgacgggagcaggaacacgcttggcggccggcttggatgccgctccagctggaggaagagccatgtcgaggatctttcgtgccagagcttggaactatgtcgcattctgttagtgtttcattcgagaatactacgacggtttttcgacataccttaacaccaccaaacacagcaacgatgtcatctccatcaaacatatagacatcaccagcccaaatagactctttccagggttgcatcctcacgtaggtgcggtaagtgacgctcggatcgaacttcttcaagcacctcatcgagtcccatccatgattgacgaacacttggttcttcgaatcggtgttatcactagcattcataatgaagccagacaagtgaccaatgctgtcaatccagaatggattgcgatgaaagttgcccggaggagcctcaaatttgaccagagcggtagcttcgtgttggtcactgtcgaggatgacttcccgaatggatttgtagttctcgtcataatcaaccagagaagcaaagagcttgtagaccattcctcgcttcatgcggtgagcctggccggatacagtgctctcttggagatgctcaatgcttcgcttgatgaggtaagagctgcgcttccactcgacgtcgtaagtactgggatcaaagaacttgatgtagcaagtggcgtggtcaaggatcttcttcccctcgggggtcacagaccacacctgcaccttggcattttcttcggcccagtttgcagtcgctgaaacgcggaagagctgcttgcctccctttgcaataagcggcttagggaccaccatgttgcagacatcaaatccgcgatctttccattctggcttgtagttctggactagatattcaccaagtgtttgggcgatatcggcgtacagggactaaaaatcaattagcaagcaagactgttaaatgagaaaagaatatgcataccgatggagtaaggcaggcaccgttcaccttgtgacctgcaatgacacgattgaggtcgggatcagcaatgtcattctcgatgacgatagacgccgacgaattgtcaccactcgtctccaaaaccttttgtgctgccgatgacaagaaaacagaaactggcgcagcatcagccactgataccggcggtgcacccttgagcagacagaagttattagtgtaaggaatccagtagttcttgagatcccacttgtaggaagggagtgggagaactttgtgtccagtgaagtcctggtgatattccttccatcgaatgtcaattccagccatatagagagctgaaacactggttgagagaaccttccacgtgtcttcctggcgacggagagatgccacagtagttgcctgaggaccgaaagttgccttgaccattccggagcagaccgggtgagagccaatctcaacccaaatagtcttgtcattcattaagttggagtgccgggtagcttcaagagcacccaggaagttgacagtctcccggcagtgacgggtgaggtagttggtaccaagcaactcaccgttggtctcattgatgacgtctccaagaagggcagatacgaatggaatagagggcgcgttgaaattgacgccctttccaatttcagccagactttcaagtataggttcaacctgagctgaatggaaagcaaaaggtacatttaacttggtagccttgaacccttcgttggtaagagtttgcgcaagctcgtcaatcttctcgcttgcgccactgataacagtctcgctgggcgcattgatacaagccacctcggtagcctcatcaagaaactgcttgacctgtgccactgaagacttgacagcaagcatagcgtgcgttccaacctcgatttgttcagtgagaagctgggctcgtcgcccggcaaggtagattgtgtcgctagttgtcaagacaccggaagcattcagcgcggcaaactcgccgaggctatggccaatgacaaaggtaggtacaatacccagagacatccagtactttgtcaatgccatttgcacacaggttgttccgagctgtgtaacgatcgggctatgctcttcaattggcacactcccgtcgaccagggacagaatagatgggaagccctggctctcacagatacaattcaagtgttcgatgtgagcacggaattgggagcaactatcaaacaattggcgtcccatgcctgtgtactgagcaccttgtccggtgaagataaatccgatgccaggtgcattggcaggagccgggctgatgctgtctcggttgacgataggagccaatgcactcctgacttcatctagagtagatccagtgacagcgactctgaagggatgatgaatccgtctcgctgtagtcgtgtaagacagattggcaaggaggcttgcatcgttggaattgaacgagttcttgtttgtatcgatgtactgcacgagagcagagatgttattcttcagtgcagactgggaccgagccgaaacaagcacaggatgcgcagaccggatatcttccacattctcgtcattgagcggaccatcctcgaccatcaaagcagtattgcctccggcggccgagaaattgttgatgaacgtcttccgcttgccaccatttggcctgttccaggggacagcttcagatgcaatgtgcacattgcgctgcgggaagtctgtcgggaagttgtggttgatcttggtcttgatgccacagtgagggggaatcatgttctttcgcatcatcatcaagaccttgatcagagctgtgacaccagaggcggactctccatggccaacatttgactttgctgaaccgaggtgaagagattgggttggcccacgacggtagtcaggagcgaagacatcgagaaccgactgcatctccactgcatcacctgcctgggtgccggttccgtgcatttcgatataactaatctcttttgggtcgctgttggactcgttgagaagcttgtcgaagatgaaggactgtgctcccacatgaggccgagtaattgacacagcctctgctgagtggttggtataagctcctccaataataccgtagattggatcgttgtctgcctgggcatcctcaagtctcttaatgacaatggagccaactccatctgctctgcaatagccatcagccccatcatcaaaggtggtacagtttccggtccttgagaggaagtgtccacgatcaagaccagcatgattgtcgggatttgccaggatgttgacaccgcccgtcacggcagaatcacattcattcctccacaaggaattgcaggcgacatgaattgccgcaagacttgaggagcaagcggtatccacactaacactggggccgctgaacttgaaatagtagttgatgcgaccgggagtaaaagcacggttaccacccgggataaagtaggtgtcaatatcctgaccactgttggtctcacggtagtcatcactggtcattccatagaagacacccactcggttcttctgcgtagagggcgtgctgtcagggatgaagcctgccatttccaaagcctcataagcagtcaagagtgccagacgttgagcaggatctgcttgaagtgcttcacggggagacatattgaaaaatcgagggtcaaacatgcccgcgtcgtcataccagcatccatattggacttggctggtatttcttttctttccttccatgtcaacgtgagccttgacatcccatcgctctgggggaacctcgcggtggacgtccagtccttttttcaaaagatcccagaaagcttcggtatcaggcgaatctggaaatcttcctgaaagaccaataattgcaattttggactgctcagcacggccggtacgattatctccaccagcatccttccggacatcaccaagtgtgctgtcaacctcgagattggagactccagcctttttcaatgagttaaataggctctgggttgcagtgctggaaattgggaacagagtgcatgttgttgtagactccaagattgactggcaagattggatgaccttgccccagcaaagctgtctttgtagaatctcctgaagagaaaatctcaagagctgctcaaggctctcagcctggagctccttgcctgtctcacttgacagcacagggatctgaggcacgtacatcatgaaattctctgtaggccacgattccaaaattcggttaatgtccctgttatcatatagatgagaggcatgataagggccgtggattggaaccattgtgggcttgtgctcctttgagagactggactcaatgaaacggcccagaaaagtcgggggaccactgatcgtgagtccattggggcttactgcgctgatataaggttgagaaacgcggggcaaggccttgaaaatattaacaatgatcctcttttatttcaagtcggtttgggggaaaagacttacattcttcttcgtgtactgttgaatcaaatcctgggcctcgggctcgtgcataccagaaattagtacagaccagcttgatgttgccgatttgcttggttctatgagctcttgtactttcaaaacgcacatcccgagcctcaaggaaacaaggacggtctcaattccagctgcaataagctccccgatagttttcgaagagcttacggccgcagatgcgagttgaccggtgcaaagtccaatgatgcagctgtcatcacccgacggataggcatggcccaaatcaccatagtagctataagacattgtcagtaagtttgattccaaaatctcatctcgatatcatcaaggcggcaatattcttactggatgaagcatcctagttggtaaattgttgtcaatgcactctctagagctgggttcggccctgactctttgaacctcgcgagaaggtcaacgatactagtaaagcgagggaagccctgacgttcggatggcggaagcgatgtaatttccttgcgtaacgcatagtagcacttttggaagaatgctgctacaagcgagtcattcttagcatgcaacagccgacgaagcccggagtcaaaatccgcagtctgatctccaaagagatacaaatgactggggccctccataatcttcctggtagcagattaatggtttcaaagatatatggaaaaagaagaaaggttcaggtcaggcgaaaacttaaggatatcatactttatagagtattttccattagtgggtcgtcagtggaagattgtaatagactgcctctcaattttcttagtagtatcgaaataggaaacataaggtttaggacccatactttttctgaatcaggatatagcaggatatacggtatggtaactcggctgaacccattgggaaatgtatgatcttagccgcatattctctagtattagcgagaattattattattggtatttctggtattgcgatgtatacatcctcaaagacaccaatggtaccgttactgcagtcgattccataacgccttcaaattgtcggtatgtttgtctgagcagagcctatgtggagatgggctggaccgaactagaatcttgtttccttggataatccgattggatcctgaattatcagtttgaattactaaagcaaccggcaaaccgatgatagtctacggatacccgtgtgctgtttgcggataaaacgagcaatgaccccagagcagagatcaggattttggacgggtatgtgagccgggatgtccgtgacaaatctatcatatgatagtagaatcatagactatagacccgtgctggagaaaaattactatgaagttgcaatcaaggagataatctcgctgcattcggaaggttacagccgctgcttccacgtatcacgtggttttatttgccctagattgatctccctgtttcttagactagaaattttaagtaataaaataatacatcaacgttcaatcgaagatcttagagaggcttgtttgcctaatgttctcaaaacagtaggggatcacataagtatagaagacccttcttcagcatggaatcatcaagatctagaatagtgcatgggatgtctcaaataagtaagaaaatgtagatcatctgcaggcatcatctgtaatgttttttcatacgtcacgactccagcttcaaaacttatcttctgagacattgagtcttgtttcatatggtcgcggcctggaagttttcactctcattcttacggtgccatctaggccatgaataagatattcaaataaaaatgttcaacaccttcgatatcagatactactcaattgacattctagaataaaccatagattacacacgtggctagtcggacgatccccatggcgatccagatgttctcaagcaatcaaatcattgattgacgacggaataagatctgccgataaatgaacgcaaacggactatcttctacaacaaacggagaacgatataaacaaatatagtaaaataaaactgtatggtatcctagctagtattatattacaagataaatgaaaataaaaaaagtatgagcacagttaacccaacgcttgtcatctttagcaggaatggaagaaaagcatagccacgccctcgcgatggagctcgtgctactgaggccgaaccgacctgagaaacatgccctctgcagctagtgtggggcactcgttacctaagcaacgcctctaccaccaagcctatagtttgaggttggagggatctagtcctcacactctgaggccacacatcaataccgtcgagtagagcaacagccattccattggccatgtgagtctggatatggcagtgggagatgaagggtccagggttaacaacctggtaccgcactatcatccatgttggtccgttaggtccattagtaacgaaagtatctctcatttgggggttctctagttggaagagttcagggcattcagcataagcttcttcggtgctgaaccaattgaatatgccaggactaaaactaagaatgaaacccttgttagagtgcttgtgcattacatgcggggcttggatggcaggactgttgggcatttcacccaactagagcaacatatcgacccaggtcccatttttggtttgaatggtaacctgcggctctaggttgttcttcgcgttcatgtcatagagaatcgggtcgtcccagttagccatcatgtcgtacaaaccactacctgaagtagtccatgtgtaagacgagcccaaacggccaatggagaggttcaagttgattggtggctttagggatagtgacagcagggtgattcttgatagccttgttttccagagcaacaacaaaagcggaggtgtttcttccgccgtaatccacgtaaggttgagacgcggttgtgtcctgagaacccttgtatttcattgtagcaaacccagaaaatacctgattggcttgggtatctggaatggtgtattccttctaaggcttgtcaagcttgatcatcgcggcgtagcgctcaccgctgaagatgttaacactctcagcaaactgaggttcgatgtagctaccattagacgcggcacttacgaacttaagacccacccagccagcattaggatcaacttcaatagtctcgtgcaaaccgatggtggtagtacagccagaatcaaggccagctgaaatcttgtcctcgtatgtccattgttaatgaacttattgattccggagaaaagtatagtatatcaatggaatatgagggaatgagtaatcttgcctatcaatctcgacaataaagcttgcctgcgtggaccagggaagcagtatttgaatggtttgcattgtgattattatgataatcccaagcctcatgcttctggggctggatgatcctttgatagtagccgcaaacatgtttgcatttttgacaaattattgtttgtcgaatttgcatagtttggcaaagataggcagcatgggtgttcactagggaatgtccaggtggctggggaagctttgacctcaaacaatttccccttttaacccagactagaaggccgaggaatgcaaggtcattcctagtcaggatccaagataattcaaggggtgtctagggatccgaagcagtagactgtttgtgcgtggctagagattccgtggccgcggtgagaatgtggcaattcccgatccggcagcctattgtagaatgacatgggctatccaatttcccgattttggagttttaatgcataatataaagacttcaatagctctaattgcttgcttgcaattttcgttctgtctttgatttagttgcctcaagtgagtaagtgtgcggatggattaaagcgtctatgcgtagtcccttggaggactaaagcatagctattcagctcaagacataatactgtgtgggattttgtgtgattccgcggccgaaagaaagcttggaaggaaggaaagaggagcaatctaaaattactagtactgagcttatatatattgccagttgtctgagattctgcacaatcaacaagtcaacaagtcaacaagtcaacaagtcttcaatctttctattctacttggatactaagaaaatgcctccgctgagcatggagtagtaaactagatttcctagtctcagacttatctataactaataataagggttagtcctcgacagttctgttccaggttctcctagagatctaaatctaacaatccccgagtatctcacctttctaaggcagtcctcaggattattcatttgaatacagacccagcaggtgaaaataaagatccgccagggatcctctgttgtcgagtgtaccagggttgttcagtaccgaaccatggatcgggtacggctccggccttttcatagaagtcgcaacatctgggggtatatatcgaggtgctcgagtaatatgacaccgcagggcttgatttagagaaatccacacacataaatatagggagataacctccaggaagaggaatgacctttgaacgatcgggaaacaggagatattacataatctgcattaagcttatcgataagccagccctccgccgctagtctcgatcgggccacaaacaaacaaccccagtcccggtttacgccccaattgtcgtcttaggcctcaccgatttgaatcgctctaccttctcacgtcttagcaaccggttccttggatccatttggtgcagttcaatctttattcgctaatcctttttattttgaatacccaattaaaactccttattccgacaatgctgattgattgagcgatcattgctatccctgcggccgtgcggaccttgtcacctatccgaccaagctgtgttgtatcgggttcgaatcaacagcacaacctcatcgattgatacatcattttcctaccttcacctggacgtggacttgtcacaagtgcgccaggtgttgaaacagcctattaggtcgatcccgtgggttgcgctcgacgaaactgtgttcaagtaatcatcatggctcagctgccaatgcggtttccatgctggtgccgagcagtatattcatggggtggagagactacacgagatctgggatttgtggagggtgacttgatcgaatgcttgaatgcgggcgatggacaatggtggatggggcggttgcgccgtgacaggcgcgcggttggactgttcccgtcaaattttgtcgagctcctgggtgaagactttgtgcccgtaagccgcgatactactagtccaatggtgctagcgggatcttctccgatcaataatcccacatcagctcccaagaaacagaagaccgtttggcggaaacccttccaggcgcataaggaggccgtatcaccagcatctgtcgctcggcgcgcaaccgcaaccagcccagccgcacctgcgattcctcaaacaccacctcgggctggcggcatttcacgaagtaccaggccattgcgcacgcatgcgacagcagtcaggaaccaaggctcgctagctcgacccacatcatccacatcgcggccctcgtcacataacgtctcccctcgttcgtccgcagagcctgaacggtcaccatcaatgctgccgaggggaagcgtctcatccgctcgaccttcatcccgcgaccaacctccattacaatcgcaggaacgtccatatgcaaacacctcaaatggcagcctctcatctacccgtcgcaacccatcccctttgccaatacgcgaatattcgtctggaatcatcacacaaggcagtactcccctttatcgggcttcatctcgtgagccgtctccgttgcaaatgcaggattatgcgtcccaggccatgccacagggcattacttcatcttaccggggctcatcgcgtgagccatctccgttgcaaatgcaagaatatccgccccccaccatcccccctggcggtatctcatcctatcaggcacagtcgcgtgagccatcgccaatgtatatggaggatcatccagctgcgagtatgccatatggtagtatgccatcttatcgggctgcatcgccattacaaattcaagataattcgtctgcaatggtcccatacgggcgttacacatcttaccgggccccatcgcgcgggccgtccccgccgccaatgcacgagcattctacaatgagttcgcatggtggtatgtaccgggctccatcgcgtagccaatcaccactgtacatggaggatcatccacctgcaccagtgccgcatggaagtatgtcctcctaccgggctccatcgccattaccagcacgagaacatccatctgcactcgtctctggcgggggtatgtcatcttatcgggttccgtctcgtgagccgtctccggtgcaaatgcacgaagagcgggaagactctccccctccccctccgccgccgccacaccgagtcgttgtcggtcgttcgggctcacactctcctcagcctccaatacattctcaaacacgaagtcattcgccgctcccacctatgcactcatctcaagatcgcgcacactctcctaacccgccatcacactatccaaacccgtcacgatcccccacgccattagttatgaatgaccgttacacgacactcaatcgaaccccatctccatctgcggcctcaatgcactctgctctttctgcaacctcgggacaatccgatatgcatggaaatacgccatctccgctccgagatgccatggaagatgttatgacttcactggaagacatgggtctcccacgccaagaccagtcgccctctccgtccccggtgttcaacgagccctggtccccagaagagtttgatacctctcaggaaaggaccccccaggggaacagacgccgggatttaacctcaatgggcttcgaaggagacaaagaacaactgcagggcggactcgtccatcgaaacagcgtttatagccatgaccacatggatggtccacctcaactgaacaattatgttcaaaggatggagagccgcctacgtcagctggaagatcaaaatcgatcgtctgaggatcgaacaggcggtcaggatgacaacggacctcctccccctcccccaaaacatgccacctaccacccgcgaaataattctataccaggacaatacgctcccctcaagacccggcgttccggccatgatctccgcggtgatattctcaaccggacatttaccaataagtctagtaccaccaattcgtccagtggaatgcaaagcaatggcacatccatgacaacgagcacagacaaaactggtcaaagtgtgatgagtgggttttccgcagggggattcagtgcgacgagtgcggggagctttgctagacgaggcgggagtgagaggccaaatacagctatggacactgtccgctctcgaggatacagtgatgcccgcccggaaacgccattcactggtgtttcctatcattccagtcataactcctctcgccaaggtgcatcatcggctattccgtggacttccaccggcctggactcgacggatcatagcggagtttttggcggtctttcgacgccaaaaagcaaaaagcaaggctttttcaaaaagatatttgaaacagccaagactggtgcagccagcgcaaggagtagcatttcggtcgggtcaaattctccaaccaagagtaacagagggatagacgccgtgtcaccggctccgtctcactcgcaccgtaatagtggtcgtgacatgggacttggaactaacgccattgactgggtgcaggtgcgccgtgatgttaaccgagcgtcgtctcctagccgaaatgaaaggattgatagggcagaacgatgccagatgatggaccaccctgttatctactccgtggaagagctgtatgataccgcagagggcgatgaaagcattgatgggcagccgatcactgagccaacgaatttccacgctgccaatcttaccctcgttgataagagtgcacgctttatcagcagtctacctccaatgacgaaccccatgagcctcgcccaagcctatatttgtcgaccatacaagagtgatgttcagcgtctccgggccatctttacctgggtcagcgagaaaatatcgtgggaggaacctctcgacggcgtcgaggttgacatgaagagacttctgcaggccaaacgaggtaccccagaggaaatctcagtattggtgcatgagatgtgcacagccgttggcctgcatacagaagtcatccgaggattcctcaagagccccggcgacgcccttgacctggaaagtctctcccgccccaaccactggtggaactctgttctggtagacggcgaatggcgctttatggattgcgcacttgcaaatcccacaaatcctctgcgcagtaaattcatttccaacaactcctccatatcggagagctggtacttcctcacacgcccgcttgatctctgctacactcatgtcccactctatccggaagaacagcacatctgcccgccaatttcaccagatgttctgctctccctgcccaccgtgtgcccgccattcttcaaacttaatatccagatgccggattatgacacgagtttcctccgcatcgacggattggaagtcatgcaactgcgcatgatagtacctccggatgttgaatgtgctgccgaagtcgaagccccgggattcgcccgcgacgtagatggcgacgtgttcgaaagcggagacattgtgcgcaagcgcgccttggtccagccggattggatccgcggccaaaagcgcatcacaatcaaggctgtgctgccaggcgacgaaggccagggtgtactgaaaatttatgccggcaagaaagggctaatgcactccagccgggacatccctcatcccctagccttagccctaccaatgacccacacgggagagaatccaccttacgactttgtgctgcgccatcccacaccccacgcccagcgacacgacttgtacatcatgcagccacagtgctctcgcctggcagttaacaatacgtttgtgtttgctgtccgccaacacgcttctgctccagcgtccgccatggacgagagcacttccattggccgcgcctcaccgtccatctttaatcgtccggccagtgcgttgagcatggtgtccagcaccacagccggtggctcaacggtatcgggcgcctctaacgagttctcggcgtcgacttcggtcatttcctcgggcagatctacttcggggcgggacaaggctgcgaaattagcgatccaatctccgtccggcaaaattcttcgtcttacccgtaaagctgaacacatgatcagcagtgataatggcaaccaatctatcagcgatgctgtcgccgaaggcagtgtttgggagactgtcatcaagatcggtgagcgtggtatgtggcgcggtctcgtactagctgaccgagctgcgcgctggtgtgtattttgcgagtgggaatgtgtttgattttttactgttacatattatgggcgtttatcttgaagccttctgatacaccgggttcagaagcaggtggctctctgtgtttttttttcttttggcttttttgcgttgtgatattgcgggttgcatatttttggcatattgtcctcctggcatactagcatttgcatgaggttagcttggggcattgcatttgcatccgatctgtccagaatctatttcaaaaatctggatttcggtgttagagtctaaattaataatagtttgagaaacccaagtccgcataagtaatctatagcataattcaaaatgatatgggaactggctaacaggctaaatagacatctgacatctagtcacaattcttcgacatatttcatttataatttagctaccgccgcgcgcagcaatggagcaacttgcttcctactcccagccgcattggtttgcacccacagctgcctccagtggagggaatcctcgtccacgttcaatgtagaaagacaatcgcctgtcagctcagggatatcctccccatcgagcggagaccattctacaagcccaagatggtgagaggattgctcaataaacctctccacacccttgacagccgcttcattgccacccgtcacgatgacgaatagctcgcgacaaaacttgtcgtcagtgcccgtgaacgccgtcatgataacaagcacatccaagtctttctcagcagaagccgcgaacgagagcgcagcatcaaggaacttctccgggccacctgccttctgaacaagccatcgtatgggcttgacggcagaacagaagcccattttcacagtctcccccgaggactgtgacgtctcaatccagtctttataatcgcggttcaatatttcctccatcgtaagaagatcgagactattcagctttgcatgaagaatgctcttgtagaacgtttccagctcccaattgccttctgaattcgctgcagcttgtgattctccctcgatttgagatcgcaggaattcgaccgcctcacgatctacatcggtcactttgccttccgcggtgagatttaaagtatcaatcagcaccgccgaaagagcaagcttcgcaacctgtgtcatttccggggtcgtgtcccaaagtttccgttgtcgcaactctcgcgtgatgagcgatgcacatgacccaggtcccggttggataatcatcggctgcccttctggtaagccgtcaatgcttggcatgttgtgctcgtcgatgtggtggtcgatacatcctacagtccggaaggagacacccggcaacccagttaggaacccagagcccttatcggtctttgatggccgcgggaacgcgttccagtctaccagcgttgcatcggcgagtatctggtgccacacatgctggtcttcgagagactgcgcgaagtccgcgacggtcataacatactcgggtagaaaattgcccgcagactgaagggtgttctcgaattgctcttcactcttcagaggggggaaattggttgatgaccataatgcagccgagaattccggtcttagtcgatacagctctgtcccagcggggaaattggacaggtttagtagtgggatatggggtcgtgggctttggatcgggagccggttgttcgcgcagtaagagtagatgatcgccgagacgatagagtcaaggtcggcagagggattgccgattacatagattggaggctcggttagagcacccgagaggaagtgaaggtgcacttggcgggcttggcgtaagaactggaggagagtcatggttgttgaatcaattgatcgtagccgatatccccgcgaacagatatccgacgtcattcattcaattgctgacacatcggatatcggattgttgccttaaacacaaggccaaacaatataaattggaaatcgcgacatcctaacttgacaacaccaaaaaccatgcttagaacaatgtctctcccgatacagctgccagaggcgttcgccaaaatcccacgctacaacattttataccctactccttctcccatccaccccttatcctcaattgcacccccaagactctccccgcaccaccccctcatcaccatccacgccaaacgagaagaccactcctccccactagcctgcgcaggcaacaaatatcgcaaactagaatacatagtcccagacattctatctcaaacacccctccatcacagccatgagaacaacccaacacccccaggcccgcagcaaggcggtgcagcaacaaccctcgtaacagagggcgcaatccaaagcaaccacactgtgcaagttgtcgctctcgcacggaaactcggcctgaaggctgtaattcttctgcaccgcggcacaggcggcggacttgcagcagccagcgacaaggaagccttccaacacagcggaaacgtgcaaatcaatcaccttctcggtgccgacgttcgcgtctgcgaagaaggggatccgctagcgcatgatgcgacgcctcttctcgatgagttgagggcgtccggacagaatccgtattggatccctggtggcgcgagcttgcatccgcttggtgggctggggtatgcgcgcgcggcctttgagattgctgcacaggaggaggagatggggcttggaggttcggggaggtttgattacatctttgttgcgtgtggaagtgggagtacggttggtgggttggtggctgggtttaagctgctagacaagataaggggattagatgtgtcgaggaaggttgtcgggattcttaattcgccaactaagccgcgcgcatatcatgaaaagcgcgtgcttaattttgcgcggagggcgggagagttgattgggcttgatggggagcgggatattgggattgaggatgtgcggcttgatgatcgctttgttgggactgcatacggcgtgctcgatgataagagtaaagagactctagagaatatggcacggatggagggtatggtgctcgatcctgtttatacagccaaggttgcgagaggcatgatgcattgggtggacgagggagaagttgtagattctgctaaacccttagagcaggtcaatatattgttcattcatacaggtggacaggctgctctaggggcttatgtggatgttaaataatacatatcaataagatatatagtacagtcggaaacgtgagtaagaatggctgaattcaactagtattacacggtgacggtagcagcaaagaaaaccagtcatgacagacataagtcttgtggtatggaaaagcagaaaagcgtgaaatcgctggaaaacacccccggactcgccagtcccttctcttgtacacccttttttgaagattgatccgagcagaacgatagaagtataggagaggcaggtaaacaaaggactaaaagcgacgcagtaaagcaatcagaatatagttaaaaaaaaccgaacgagacgtggtcaagttttgaataagaacaaaagattcattgggaaaaaagtaagaagaatcagtcaaagttcttcgtcctcaaggccaccattagtgccgtcgagtttgggcccaccctgcggaccaccgttttcgccattttgaatcgattcctcttgaacagaggcagcacgactactgtcattactgaccacgagggcctccagggcctcattagcatgggtattctccatgggctgggtctcagcttcagggtcaatctcttggttggtcaggtctgcaaatacatcatctaggttctgacgagggctgctgctcgcgaactggggatcatgaccgaagcgtggagggctgaatagggagggttccaggtcaggctgaggaggaggagagcgtggtaggaatgagggggattgagaagcggctgcatgcgggaggaaagccgaggaggaagtaggtgcaaaagcaggcgtggaatcgctcgcgggtaatgaatagtttgcggagaatgggtatggtgcagcattcggatctgccatctgagccaacgttggacctgtgccaggaggttgtccgctactagaagtcggtggtggtggttgcatgggtgcggattgaccagtagctgcctgtgattgagcatcaacagatttccttttggtaacgccaatgtgcttggggcgaagatgctccgggagatcctctggacgattgactccaagctgagccattattttctgttgcttggtcgggcgcggttttcgtgttgagagagattgttccagaattggagggggttctggtgcgacgggtgcccacttgtgtatctcctgccggaagaaattcgtctcaaaggtgagaagaacctcagcgccctcgattttgcgaaggtagaatattagagtaggcacttcctcagtcgttgtgcaggcagcattcgtgaagccatgcaggaaatcacgaaaggctgtcgcttgattaatgatactctcaagaacttcttcttcctcgggctggaaaggcaaagttgcgatctccgcgtgccaatcttgcagatcttcaagcttgggacgagcagcgtcacgcgggatcttttgacgccagtcgcagattgggcaagtgtacttgtcgaattccttcactttacccctagcaatcttcaaacatttcccatggtacctacacaggtcagtaaataaaccacaagctggaagttttttggcttaccattcgtggcagacttcacattcaatcatcattcctgcctcggagtgcctgcaaatacagaacacatctcgctttcgtgactttgggccccacatgttgttgggattgctcggattctcaagcaaaccttcgggagaattgtctcgagacgaaggctccacaggaggtcggtaactgtcctctaggtcgaaacagtacgagttccgcttcgcgacgtattccatatgggatcttagaatatggagaggcgcgttcgccttaccgaacagctttttcccttttctcatccagtcttcatggcgcttttgttcacgttccaagtcgatcgccccgatgggtcgactcgtcatgtgctcaagagattccatgaggtctcggatgtccttgtacttgggccgattcttcatctccgggtccttgctcttttcatacagagtctgtatccgtttttgcgcctcacgctgcttggtcaatatagcatcgacggccgcgagggtatcaggtgaaaccggaaaacgagacgcctgcgcagaaagagcttctaattgctgatagtgaacggcctcgacggacattaattccttggccttcatttcccacgcatccccgtgacgagcaagttccttgaaatgaattaagtgttcgttggtatcagagaggccgacctgttcagcaccagcgacaagttcccggcaatcggtaagggtcatgtagtggtctcgtttgcgcacggcttgttcaatccatttgatttggcgggagacttgctctaggtgttccagttccgggacttccacgttgaagtttttgccgcgttcgatgagttcttcaatctcctggaggggccgggtgtgcgggtgcatgagggcattattaatatcctgttggaatttctcgatttcgcgggttttctcttccaacaccgccatctgtggacagtcgaacgaaagtttatcagcctctgcctgaagggcgtagatatgttcaattctgcggacttcgcgatcgcgatcgtccagctgcgacgccttggtactgcccctgcgccaagctttctcgttttttttccggttctgctgcttccgggtaatgtagttgttggcttcttcaacccatttatcgcaacgctggacgaaggccgcaagatcttgaaggcctggcaagtggtatgggattttctcaccttcatttagcaagttatgaagggccttaagctggggcttcggttcatcctccagggttttgtcgagcttttcggaccatgcttcgggaattctggcccgttcttggactttctgcacgagagactgcaattcttcatcacccatgcgatatcggactgtgtgtcctgagccacacagcttctgagcaagagtttcgccacagcagtcataggtgtcaacgtgcgataaacagacagtcttgcctgatttgtgacaacggaactgagtgaggtaagcgtaggccttgcaatgttggcactggtaatcatcctcggaaaggtcttcattctcaactacgaatctcggctgcacatcatctgccatggagtcaggaccaaagcctggggtgcgagcagaaatttctttttgccggtataagaaagcagcccgatccctcagttcacgggcgcacgttcttgctagtgcaggcgcaagccacttagcagtagcaatagtggtatcacgtgcagcagcggtgagaagtagttcatcgtgggagaaacacgggtgcctgcggaagttctgaagacgatcaacacctgctgcaccgtatggttcccagtccgcaggcgcgaagttgactgcttcattgaaattaaaaccgtgattaaagccggcatggtatgcttgagggaacgtgagcacaaattgaccagctcgctgatccaacgcataaacgttgactccggccttgcgaagcttgtctggcggcatgagggtgacgagctggaaaagaagatcaggctggccttcgaaaagctccggaactgcatcccgcatggccgcctcaaaggcctctgcatcggcgcctgggattccgtaccaggtcttggtagcaccgaagtgttggtagttggccgaatacgcgtagtgatcctcattatgccagcagaaagtagagaaacacatccccacataaacccacggaacggtcatgccagagatatcagacttgatgtaacggaagagcgagtctccatagaatggaaggacatttaggttccaaggatctgacgaaaatggatcaagggggttccgctcgatagttgggaatccactaccatgcgtggtcgaatggatgtcggcgccgtactcgacttcgacggtctcatgtagatcaacgacaagcttccagaattcggcctccacgtcgtcctcggtttcgcggcgatgagtgttgagaactggatcgaagggcattttcgatgcgaagtacttcttcttgaactcgtttgccttctcctggaactgtttgagtgagtaaacaccgccgtcttcaaatccgaattctcctgtgccgactagacacttgggacagtgccagtcatgttccgatggtgtggtagtagagggatcgagacacgctttgtggtatccaagctcgcagccgtcgcatactagaataatcccttgatcatcggatttgccacatgtctcgcatttctgttcatggatcagtatatcatcagaaccctgacacgaacccccgcctacctctccagctggctgggagccatccttgcgcgatttaaccggtgctgggcgaaggagcgacatatgagaaccagcaacggttggaagggaatctagaagggttagacaagatttgcttcgaatattaaaagggcaaaaaagcgtacctttcttgaggcgcttgctgcgtcgaccgcttccatcatcgtcgtcgccattttcacactgagaactggcctcgcggctgataccacgcttcagagactcctcatcttgaccatttacaggcgttgagacgaaaccatgctcggaaacgactttgggtgtcaatgtgccgttctctccctcccgcttgattggcgggccgttgttcacgggcgtgaaaggagagtgattgacagcggtaaagccaccgaggccggagttgacgggagtgaagctcgtgggtgctgggcgtgaagcagggggaggagtaggttcgatcgggggtgttggcttctctggggacttttccattggagtgtgtgccattggagaatgtgccactggagtaaatgccattggggtatgcgaagcagccattcgaggcaagctaggagtgtcatcgcgaattttagaaggcgtgccattttcatccaacattggcttgtgagtcatgggggattgtagaggcgaaggggtgtatggaccaccatgttcaagctcgagctgttgttgcacaccgggcttggcccgcgccaggtattcctcgtacggctgcaaataccgctggtatgagttcttgagcgaagtggacaaagaagacattatcttgccgctgtatccaagatcacgaccaatttcggcccattttttggtcttgcacactgattcaaacccaccacgactctctactgcctttttaagtttgtagagatctaatggtcgcttgtcgacgctgggtagccggctatagttagtcccatgctgtttgtgaaacatggcaagtccatcgacataattcatgttcgcgcggtttcctatgttcgaataagggttagatccgcactgcggtgtgatcctaccagctggagtaagctgggcgtggggccttacctccttcgaccgaattcagctcttgtcgacgtgtcttgaagtggaatcgctatatccattgtcagacgtgatcatgcgcggaaagcgacggtgggccggtgaaggagggatcctacctctgtatcgattgcgaaagtcggttgccagccctctggtggaaccactcggcaaattccatacttcttcccctccggagcgatcttctgaatataggccaccgggtctttgaattcctcctctgtcggacggaaggtcggggcttctgggataccatgaggacgaatgcgcttggatggttctctggggttgttgggctgtccgcgccgttccacggtggacaaatcgagaggtgtggacctgcgagcgctcaggggcacgttgtgggagtgcgacggatgggtactcgaggaccgagtcggctggcttgctgcggccgtcgaagggggccccccccgggnnnnnnnnnnnnnnnnnnnnnnnnnnnnnnnnnnnnnnnnnnnnnnnnnnnnnnnnnnnnnnnnnnnnnnnnnnnnnnnnnnnnnnnnnnnnnnnnnnnnnnnnnnnnnnnnnnnnnnnnnnnnnnnnnnnnnnnnnnnnnnnnnnnnnngcccgagtcggctggcttgctgcggccgtcgaggtcgccccggcagaggccggagctcccattgttcgaaatggggcaggcgattaggggatatgtttgattgagcgcgcctgtttgaagaaattcgattaacaatgaccgtaatgcgtcaacggcagggcgtgatgatagatatcaggaaaggcggctgccggcgttcctgtcaatatgaccgaagggtgaaggatcggtaacgaaccaaaggatatgagagaatggatattgaggacaaacgaaaggaaattttgactcggggcgaaaggcaatagaacaagaaaagagaggcccaagtcgcagagaggaaagaaggatagatgggatagaaaccttaagagtggaggaatgagattatgtgcagtaaagatcgactgggggtggtactccggaagtactgccaggttctttttgtgtggccagccagtacgaaaggaaccaatgagtgactccggggggacctgccaccagccgcgatggtaccgatcagtacggtaaaggagttactgtaagaatgagctaatccgagctcaggaaccgcctgtaccctgactttcacgtgaaattttagtaattatactgcaatgctgcaaacggggatcatacggtgtctcctaaataatttcgtgtacggaccgcagtatttgggagcccaatgttacgccgtagacctatggtgtatggtggatatccaaatatagtgtcttgtgacatattaacttgatagagggatgtgcctcggatactggcgaaatattacctgcgtatagactttgtttctataattgcgatgtttcaataatggcttgatatgtattttattccggtttattgtctttttgatatcttcaaatgtttatcaatggagttgtgacatagttgtttgtgagactttcagtaggcattctttgcacatcccttcgatacacataactatcgtcaggtaagaactccattacatatgtaagtccctatcatccctagacagcaatgcaattccatttccccttagaggggaaaaaatactttatcatgtgatctgtatatcacggtaccgtttggacccgcacgtattcgataggcagagctaatttcaaggactcgacaagccgacaacattgaattgaacatttcaatgtcaaaaactaaaaaaattcctccaaatcaaacatcatggaggagtctgaaacccctaaaccaatcccggcatattactgctgttatctcctccggtcaaccgttcgacacgcatcactatatattggctcgacgccaaacccgatcagacgactctctcagcacaacggtgttgccaaaggtggggccaagcgaacggccagagataaattacgcccctgggaaatgaccctggtcgtagagggtttcacgagcagagtcggcgctttgcaattcgagtaagtcgcatgtgaattgtttgtatatatcgcgtctcaatttctcattgcgcgtagatgggcttggcaacacccagaaaggtcgcggcaccttgattccgaagatgatctagactccaagcctcgggctaaggccaataccgatgcgaagacgggcaaaccaaaaccgaaacctaaagcgcggactaggagatccctaacggcgcatttggaggatttgcattctctacttcgttcgacctatttctcctcttggccgttacgagtccgtttcttttgtgttgatgtatatcgtgtatggcgagcctggaatgaccgtgtgaatggtcgcttacccgacaacatcaaggttattctagatggagacaaccttacaaaaccgcccggtccaaagcaaggcgacgagttcgcacccgttggaagcattaacagtttatcaattgactacaccaggatagaagattatctcgaaaagtcaatgttcatgctggaagacccggatgatctgcagtgcacggtctgtaaagagtcgatctctccggacgaacaacaaatagttgtgtgtccacacccgaattgccgcggcacaagccatttattatgtctatctaccacattccttgatgcgaccaacggaccagacctcctagtacctactcatggaacctgcccggcgtgtaaaaacaccgtccagtgggtggcaatgatgcgcgagctaagctttcgcaacagagcagagaaagaaacgcgcgcaattctcagaaagaaggagaaacgtgttcgcaaagaatctgccgccatggaggtattttcaggatcccggtctgctattgaaccaaggtcattgccggacgaaccgacccaagacgacctagggccaaactggttcgaggaagtcgatatagaatctgactcagatttcgagggtcgacaaaagcgccgcccgacccaacctccatcaaagctcgagatcgtgatcgaagacagcgactgggatgacgcagaaatcattgaatgaccaaaccaaacccagttttatttctaattccttaattcgcaagaggctctaatttcctcaacgcgcccgtctcgtccagacgtgcaatgcaacctgccacagcactctgtatctcccgtgacacctcatcaatggatttccccgcatcgataatagacacatcctgctgcttctcgaagatcgtccggaaaagctcccgcacgcgggtttgcattgcctcgttttcatatcgctcggcaccgaacccaccacgttttgctgcttcctcgggtgaaatgctaaggaataaacatatatccgggcgcggtagaccgatttctggctgccatgcccagtccagtgatagtgtggggttcgctttcgcggcagagtaaacaaccccggaatatgagtagcggtctacaatgacggttgttccgtttgtgatatcttcttcaatgctccttgcaatttcccaccggttcgccgagaaaaggaggtgaatggaatggtcgtcttggtgggatgtgccgcgtagatagctatcaatcaacttcccgatgggcgtcgttctgtctagaggagattattagaccaatgcacccatagtaacgattaatcaatacctgggaatcgaatgtatttaaccacatgcccctgctgcgagagagattcccgtagcatctcacactgactcgatttgccagcgcggtcgagtccttcgacaacaatgagcgctccgcgtcgcgtcggcggtgctgatgggcctgtcatgattgactggaatacaggggtgtgattatatgtaaatatctgagagttgtaggtgaggatcctcaattcctagtgaaatgtgtgaaatagcccaaatgtttccgaaggatagcgagttcgatgtttatcgggaaatccgatttcttcgataagaacacgatctgtccaaacatggtctctcaataaccacgaacgccatggaccaagcgacgtccgcgtccccagcgatgaccttcagcatcctggcatctactgctccaatccttgccccgcgagtaggaaaattagccattccagggcgcaagaccctcgcaacgccgcaccatatcccgctcacttcgcggggcacagtcccacatgttgcgcacgatgtgatgcgcgaccacactgagatcaacagcttatatgctggattagaagattgtaagatgaatactccgagatggctacaagtctgttctcatcaatagctgacagcgcatgcccatcgggcatataaaagtcatcgcgaaaaaggaaccctcggtttacaggacaccagtcgctgatcacgagtcgcccttgaagaaattcatctgtgtggctgaggatatgcctctgatcctaggcccgcgtcgattccctccgatcccatgcccgcccgcgaacacaaacacttccatcgcgctgctaacatcggtcgggttcacccagttatctgcgcatgattatgtgaaggcgattcagaaattgagaccagacattgcggtcgggatggtggacctggctaataagcagcctgggtctaagaggcgagggaagatggttgaccggacgcatgcctggacacgcgatgcattggagcagctctacggggacgctgtggcagagaaagacaagtcaaagagcgcatacttcgcaccggtactgcctcttgataatgcgcagcagtctctctatctggatgatttggagagcgagttccgctgggatatatccggcctggcgctatatgagtctgcgtcactggaattcgtcccagagtcgctggcgggtctgcctcggttgctcttcagcgagcccgagactccccacactatcctgcgtgacatatcccttggggcagacctcctgactacacctttgctcggcgcgtcgtcggacggcggcatcgcgatggaattcgtcttcccagctccagctgccctgcaagagggcaagtctaagcctcagcctttgggaatcgatatgtggactgctgatcacgctaccgatatatctccgctgggcgagggatgtgaatgctatacctgcaagaattaccatcgtgcttatattcaccatcttctccttgctaaggagatgaccgcttgggcgctccttcaagtccataatttccacgtcatggataccttcttcgcaagagtgcgggatagtatccaacatgggtccttcgagcaggacgtgcagacgtttgctcgtgtttatgctccttcgatgccggagagtagtggagaaggtcctaggtatgtcaattgccaattttcaatgtgtttttatttcaaatcactaacggtcttgccagattacgcggttatcaactaccggccaacgggcctaaccagccccgacgcatgcccaagatatatggcgctcttgacgatgctatacagaaattcgccgatgcccagtctgaaatcgctaccccggacaccgacgcgagcgggctcgaggaacacgggtttgctgagaagttgtgatggcagcggggagaatcgcctccggcaaacgcttgcatgagaaacggtacgtatttatggaagcatttgcttagcaattagcgtatgatatctatagatcaacacaaaatatatatactggattgttacaggggcccttctttggctaattcgacccctctgtcttacacataaggcatcaatttcaatttaccagacttaattctacacttttgaattctactttacgtacgcggtagtcaaaaatcccttaatgatagttatggcggtaagctgaatcctgaaaaaccagacagaggggggtaacaatgccctataaaagcaggagtgcacgcatattcataatattcatctcaataggatggggtcaagactagtgtacataaatccagattttgtgccattcttagtctatatgtccaggcttgcccccattaaacccccaaccgtcaaccgtaagaacactagggtatatctttatcctgatttgtagaaagacgcattcttaaacctcctcgcccgccaagacccgccacatccacttgacctcgtcttcctcctccttggagccctgcttcgtaccggcaccgaattgctgaccgacaacacacacaagccaagcgtcgttcttggtggtgtccaggtaggtttcggtgggcgatccgcgggggtagatgcgacgccattcgtcccagattcggaacgcctcctcaccccacgcacggaaactcacctcctcgatgatcgttggggtgacgatctccttaccgcggaacacaccccaggtaacagcgttgacactctcggggttggaggcaaggtcatcgagttccatatctgcaggctgggttgggagcgaggactcgaaatcgcccttgatgtttgtggcgaaccaggtgagcttgtcgcggccgtgcttagcgaacattggcttcaggatattggtgtagtcgtcgttcgagcagaagaactccacaaatggcttctggaagacgaagccttctcgttggggaccccagccgaagatggggtggtcattgtgtacaccgttcacagcgggctgcgaggccagtgtccaccagccgcggccatcaatgagcttcaacagctccggtcgaatcagctcagtctctgcgttcaaaccctcaccatcctcttcggcaccaccctctgaccaagggaccatgtgtagctctcccgagacatggcgacggaaaagggtgctcatgtccttgttgtccaccgggtggccccatagcctacgtgcggagttggcagtgacatggagcgagggaccatagccgtcgatctcaccaaaggcaggtgagcgagcatcaccccatcgtccgttggggaagtcatcccatgttgcttctctgccaagggcaccgagaccctcggagatgagaagagtagtactgcggtttggcgggggtgcaggcacgcctgcgctatctgcgcgggcctcgtggacggagtcctgcgatgacccgtggaccgatagcttgtcgacaatgacgcggttgcggggttgcgagttcatagaggacgcacggcgtctgcgcgaggcacgttcagcgaaatcgagtggaatcgatgcaggaccatcctcgatagcattttccccagcatccgagtacgacggaatcaaatcgcattgttctaggatgaatgatactgtcttctccaagttcaaggtgtagaaatggaatcctcgcggtcccggggagggaagctggctcataccacccacaatctcgctaacaatatccacacccgcgcgcttgaccgcgtcgtcgtcgtgtttcaattcttccatgcgtttggcaatgggaggtggaatcgtgacatggctgagcttagtcacgcgggtgagaatcttatagctgtggatgggcatcaaacccgggatgatggggatagtcttgaaagcaccagactcatggttgcgaagcatgtgttcaaacttttggtaagcgtcgaggtcgtaggtcagttgggtcatgatgaaatccgctccagccagtgtcttctcgaccaggtaaggtatatctctggccggatcctgaacgtcctggaacgtgtcggcgggatggccctccgggtatgcggccacaccaatacagaagtagtcgccatgtctctggcgaatgtatcgtaccaaatcaatggcaaaagtgaaatccttgttgctatcgtcctctccatgcatgttatattcctcgctgcggggcggatctcctcgtagggccaggatgttgcgaattccgagaaccttggcctcatcgagagccatatccaccagctttcggctcatgttcgtacatgtcagatgcaagacggttgtcaactgcagttggcgctggcatacttccgccagctcgagcgatcgtgcggcagtgctaccaccggcaccccaggtaaccgtgacgaatagaggacggagtgcttgtgccatccgctccagacgcgcggacaggttggcgaagccctatagtaggccatattagcaaaatatccacgactgttcagcaggcggggtaacccccaccattcgggtctttggagggaagaactccaaggaaaagtagttggcatctggcggcagagccgcgatcttctcggtgatcttcttctccattgcgtcctataagtgtatgggtcggcaatgggaggggttgaatgaagaagagaggattcggggcaaaagtggaccatgtcaccatctgctccagtcgcatcgggaactatgatgtctacagctgccgactggccatcgtgcatgaaaggtctactgcaaatacactacatggatttaaaggcttaaatactgttcctatgcaaggagtaactttatcttgatcccgaagagctagagaaaaaaaaaactgacagtgcaagagatgactcagcgagacaatcgttatttttccccggggcccgaggtctcatcgggatcggcgagcttaatgcgagcacttgtttagcactcatgtattttggcgtcggagaaggcatgatcttttgaacatatgtagtctctctttttgaactccacaagtttaccaattcattcacggaaaaatggcctcccgaccacccaacgttctccgctatctccgtctccaaacaactcgacacgctaggtcgcatgcgtcgcgacgaaccatttccactccatcccctccacagccaccgaaaccgtcacagccgatccctaatgactctcactctcgcctgcgtcggctcaacgaccgcctccctcgctttctccgcacatacactacacccttattaggggcgccggtcacccatatcacttcattcctaatacttcatgaaataaccgctattgttccaatatttggcctggttggtgcatttcactatggtgtttggatgccggatcttgcatcgcagacaggcgagaccaatgccttcgacgaaggagctgcgcgtttcggccgctggctgaaaaagaaaggttgggtgaatgagtccgacgtgaatactgttgccgatcatgaaaccactgcggagaagactgtggaccgagcaggtgttcgattggtgctggaatttgctacagcctatgcggtcacaaaagctttgttgccagtccggttggcagtgagtgtttgggcgacaccgtggtttgcaaggtcggtattcacaccgatagcaaagctagccggacgtctcttcggcagaggatgagctagtcgagcactactactatgataccagagagaagtatattcataggtctatgaatttgtatactgtgtattttgtcaagccattggacttcttcctcagaactgctgctttacgctatgctacaagtgtccgaacaagaaatccgcccgactagtccacttaaaggcgaagaatttattcgtaaacccaagcggcctgggcggaggtgtacttgaggacctcggaggcaccgaaccagagagcaatctccttcttggcgttctcgacggagtcggaaccgtggcagacgttgcggccgacatcctagtcaaattgttagtatgtaatgacacgatctcagaacatacggggttccttacgatggcgaagtcaccacggatggtaccgggggcggaagccaaggggttggtggcaccgaggaggacacggccggtcttgacagcgtccttaccctcccagaccatagcgcagatggggccgctcagcatgtctagagctgtgttagtgtatctggatttgcggaaccattcggacgaggaaactaacaggcgacgagacccttgaagaaaggcttcgtggcgagatcagcgtagtgcttctcgaggtgctcctggctaggggaggtgagcttcatggcaacgagcttgaagccacggttctcgaagcgagagatgatgggtccaatgaggccacgctggttgatgctgttagtaaatgtcgttcaattgcggagctcttccgggtccgttatgggttcaagtcgaagggggggggtgtgtccgtacctggacaccatcgggcttgatggcgatgaaactagagcaattgattagctttaccggcagcgaggggtaatagcaatcgaaaaagaagggggattagggaagactgattttgaagcacatacgtctgttcttcgttggcggacattttgaatgtatgagaatgataatcaaagggtatggagtaggaaaagagagcggaagagggaaagattaaatagaggcttttaaaaaactcgggccttcccacttgggccgttgattggtggccggaaaggaggggtgttgatgcccgatgcctgaattgtaaggcatgaagtggacttttgtaactaaatatactcttttcactcttcgcttcatggacccgactacgaagatgaaaacatctatcaactcgaaaataacagttcaattctaataacagcatctaaattcaagccatgattccttcaaataacgactcgcgtctagccccgtccccagccgtttcccctggcaacttcccctgaacttcagcaacgtgcaatctcccaactagctcccaatttctagtttcaagaccctctattcttcgatgcagtagaataatttcttgcaagcctctaagtaaatgaacagcggctgctagggggagtcgccgttttcggcctctgtatactttgcaaacagctaatcgtcagggcaaaagctgaggggagatccagctcgacttagctggcattacaaataaaggccctccatccacctgaaaagcaaaatacacttagaactatgtactcgaagtatatatgtacgggttcaccatgtcaaatagggagaactcaggctttattatctcggtctgcaaacataacgttgtcttgacgaagatcgttgtggacaagattcaaggcatgaagatgatcaatgcctgccctgacctgctcgaggcagctttccttgtcgaccgagcgcccgtccctcaggcggtccccgagcgtatccgcgtgtttttggaagcagagcccggtgatccggtcgtctttcaccacgcagccaagatagcaggtgacattttcatgtgggtgttccattgggtattcccttaaaaactggcagatatgcgcttcctcgagcaagtatttgctgaatgcctctgatttgtcgtagcgagtgagctggggctgcttgatctagacgtccggactgtgagtgtttttgtatattgtgaggttatcatatagccggggccagatgtgctctggtgggatcttctggaagagtgattggtcgatattggcggggttctccagaagatgctcctttttgggctgatgggaccaaaagtagtcgtcgccatcctggaagataacgatcgtgtatagaaattctgggataccgctgctaaattcccaggtctctcccttatcgtaagatctcattttaataagagaagactattttttcttgaataggatttcaagactgcgaggcaatgaagaaggctggattacaagcatggagcccttttcttaagtgctagggggcgctaggtacggaactctgccataagttgtaaagtggaccaatgaagtatcaggtgatagcgtgcggtgaatggcaaaagtgagatattccacagaagagtgatttataaaatactgcatcccgaaccatttatctactacctacgcgcatataaccaaaaaagatgagtgacatgctactggatctaataactaatcctgacaagcattctccaatggaccaaggcttttctatagattcttgaaaatttactgggtggtggtcaagatcaaaacaatgctccgaacgataaggctctttgtcggcccaagatattgagttcatgactttgtcgttgaatcatacttatctctccgtctcccccttctatgtagatgatggtcaatgttcttttcctttttctttagagtgcaccatcgtaacacgcctgaaattcgtttagtcatttagatacgtgtactagaacttctaggatttgggatacttttcgccggaactcagtaagtccttgcctactttgctaatcaagctcgtccaatttatcgggcaaaatgcctgtgaggcgctgatgcgatactcgcccttcacaccatgaggtctggtctcatcatgccccctacagcccgcagtgggtccggggccccacttcgggttagtctaaaatctaggacagcacacggagtactgttagtttatgcaaatagtggctgtaatatagaatattgagcttgcaatatcacaatagtatgagcgagcagagatacgagtacatttttccattttaaaaactacataataagtacgtagtacaaaagacaaataaaacccagaaaaaaagacaccaaaaaggccacacacacccagttagcataatacagtccattatattgctcgctcttctcctagcctcatatcaagtttcttgcaggtagctccatattcctacctcatagtgcctaggtgcagcttttgtatggcctttagaatacctttgactgttgtgtttgaaaaaggaaagaagaaattccatatagctgagtgaccttgagacattcattaacctcacagaacggtaaaacagaacggtaaaatcacaatgtccatactcacatgtatgtctctctcaatagaacccagcagtcttcaaagatttccattcggctgcgacgtccaacggtccccgggcgatagagtcaccagccaaatcgacaagaacatactgcttgccggagaaaaagtacgcctgaagtttgctccttctcggcttaaacacaacagtatcgattgtcttgaaattggcttgtgccaaagcattgaagcgcaacgcgatattacccgattccaagagtatattccggttgacatcaattaaagcgtacctgtccttgcggaagaaacatacgacatgttgatactcacttcctttgaaactgaaaggcaatgctgcgtccaccaggtcaaagcccacatctttcaggccaggccatttctcctggaacctgaatggagtcaattgaccgccactgggatgtccggtcttagcattgagtctcacgcaacgagatccacagaaaaagtatgtatcaacttcgttgtctgttgcaacgaatgcggcatttatcggggcaaatccgaatttcttaagcccaggccaccatgaccaaatgtccctaggaggacttgggtcgatggtatctgtcatgacattgacgcgggcatactggtgatccttccagaagtaaatctcatcctctgaccatgtaagtgggaaaactgccttggtcgagccggagaatcctagaagtcccttgacacggtctagagggtcgactcctactggaatagtcgagtacaggacctctccgctcttcgtaaagctcctgatgacctgctggccaccatcatcccgaactatccagtcggcaaagtcgttcgccgttgctttgtttttagcattcttaccgaccagaatgtgagcagggttaagtagaagatcgttttcgtcgttgtttccttcggcctaaattggatgttagcatgtaattttcgatggtacatttccgaaataattacaaagattgtaagttgttttctagtctcatcttcgatcgctagccaagtctccttgtctatcacggtgtattcgcctctaccggccgcctcacggatagcttgaaaggggaacccagggaacatgtgataccacgaggttggaggattggcccatggaacctggccaatcgtggcccagagcagagactctatgatgtttccagccgatttgtcataactgagtgaaagcaaatggttagttagtggatgccaaatatccgatgatcgggaatgaaggaccagcccgaatacctaccgcgacaggaacttgatgggcttcgctgaattcttgctctcttccattcggctgagcaacttggttaacagagaaaatatactggtctgtctatcctctgggaggttagcagggttgcgttttgggcctgcagtattcaatacataagattaaccgagacttgaaatgtttattggagaggatgaaaagcataccgacaagcatccaatggtcccgccacgcgtacacgactcggtcaatgacattgtcatctagcgcattagacgtgatagcgatatccgcggtctctttgagcagattctcaatcgaagaagtggtatcagacttgtaccattcaataaggaaaggctcagctttcttgttatccacacaactattggcctgtaggtgagaattttgaagctttaaagcattcccgcacacattttttgtcttgggcaaaacttactattggacaaaacttattgccaaagcctccagcagaccagactgaccagctccgccagttgcaatacggagaagaaccttctccttgcgggtgctatacacggcagagggagcaattcgttcagccatcatcggaggttagtgaaggaatagtcaacaaattcaaatgatattgtacttgttcttttctaaaatctgcagatatagatcacaaaggtatatatactctgtgccggtcattggtaagataatttccctcgtcgaccacaggggctagctgatgttctacaagtcgaccacagtggctggctgatgttctacaaatcgacaaaagtggctggctgatgttctgcaagtcgaccacgttggctagctgacgcattgacgacatgtctacgcagcaggatagtggatctattttgactggcagggggcagttcacgcagccggtggcccacttaaatcacgtgaaacatccactgggtgagctcacccggcacttacgagtgatctcgccggcctagatagtcgttgccgagcaaagcgactgattctaacttctaatgctgtgcaaagccccctcttactggcttattggcttcagaacgaccccgcggcttgatcaactcccttgcttttgtcataattctaggagaaaacttggccacgtgacacgtacgtaagaccttctgatttagttatagtttacttgcttcgcttcgctccgcaattattgcacagatactgtatgttccatgaatgtatagaataacatgactactgttaagttcttaaaggtgttatccctccctgattcgcctcggtggttgatgggaggtattgacgagaaatgattggtagaagtttggtattgttaaggtattgattaggccatcagtcacgtgttttaggtgggccactggttgggtagattgagtaggcgagcagattctcagttgctatctctgctcgtatcttatttttgtgcattgaattgtatgacacgtcatcctatattgcagctaggccgaactgtaaaatggtttttatcacctattcccgtatatcgagaattagtaaaagagagtagaagtacaaaggaagctactggcatggcaggcatctctaaatacgttccgacatcgggctctcctatggagactacactgaagtattggcgccggttgcatagatttgcatagactcgaaacaaacgtttagtcgtcaacatgtaaggaatggaaaatgaatcacgacagaaatgggactaaatcatttcaggtgtttgttcctactcaacttctgggttcgaatagaatgccttaatcttcctctcagcataagaatagtccgctttgacgtcctcgagcgcctccacaatccgtctcaagcatagctcagaatcaggttcaggtgagccgtccaaatcttcgttcattccgtagtgctgaattttttcgcagcctttctgcactttgacaagccctatagttgctgaagaattttttaaaaaatgggcgagttcgtttatctgtcggagttccccctccgttctatattgatttaaagatccgtcagcaatccatcataattgattattattactcaaaagccccgtgcataaaagtatcatttcgtacaaaggttcaactttgcacatttacttctagcaaggtttcacgcaaagttccagtgagaccgaaatagtctcgagaaacagaagggcgaacttacattgccaaccccattcgttcaaaagtctcttcaacttgctcgaaaaagccatagcagatactggtgctgaactctctatcgtcggggtcatcgtccatttccagaatctgacagaacacagaataatccactgcgtcaccgaagctgtcctccaagtcctggtaacatggttagcaactaaatccgagggcccaaaaaaagacaattgacattgaacactaacttttcctgtattggttgacatggtattcatttgtctgttcgtaggtactgtgtgttgtctggagatgactgaagattgtaggcgagagacgagtttatgtagacagcaaaaggatcgaccagtctgtccgagtgttcagcttcaacgtcaccgagtcgatcattgagtcgatcagtgttttcagctaagagacgatcacatattgctttttcgggtacggaggagcgagataccgcacaaacccacaattcgacttcgttctcgcttcatggtgacaggcgattatgtgatctctgaatagcttcatactttcataatatggggctgatcgtagaagtactacatatgtggctggtgtcagtcgaaggctgtgctttttatactagtgtgataccgtaagtgccaagaggtactcggcctaattagattagaggactgtggcagtagtgattcgggctgtgccaacagtgtttaccttctatgcatgtgactgaactaagcaagatctgctagttagttaacatctaactaccagcctgagcacggcagatcaatagaaaagcggtatagtcacagttatgtggtcatatcgcgaacgccgattggttcaaacgcaaagcaagttgattggctgttcagaagctgtagtggctgccttgttgccttaggggtcttaccccagctcaggccagctcagcttgtagcttctgttgacggcatctccacctctaaatgcaggtcaatcattgataaccaacgccactctgtcggagattgagggtctctgattgatcgtactatttatttcaccatggccaggagtctacctgcgccccgttgggcaatgttgctctccctggttatccttctcgtctgcattgtggtccccggttgtaaggttgccttttgccaaatcgcaagattacagaaagctaactcttatgctacgaacagttgcggtcaaacacaaggatttcaagacttgcgatcagtccgggttctgcaaacgaaatcgtgcctacgccgatgacgcctcttctcaaggcacttcatggagctcaccttacgagctagaccccgccactatacatttcaaggatggaatgcttactggagtcattttgaaaaccacgactgccaatgaaaaggtccggctacctctcacggtgtctttcttggaatcgggagcagcccgcattgtggtggatgaagagaagcggatgaagggcgacattgaaatgcgacatggcagtcaagcaaacaagaaacgatataatgaagccgaaaaatgggctatcgtgggtggtttagaagtcagcaagtcggccacgttgaatgcccagagcgaaactggattcacgaacgtcttgtacggaccggacgacaaatttcaagcgatcgttcgccatgcgccatttggagtcgaattccagcgggatggacagacccatgttcaattgaaccaccaaggcttcctgaacatggagcactggcgaccgaaggtagatgccgaagacggcgaatccggcgaagatgagagcacctggtgggaggagacgtttgggggaaataccgactcgaagccacgtggtcccgagagtattgctcttgatattaccttccccggttatagtcatgtatttggtatcccagagcacgcagattcgctctcgctcaaggagactaggggtggatctggtaaccatgagaacccttatcgtctatacaactccgatgttttcgagtatgaactcgaaagcccgatgaccttgtacggagccatcccgctgatgcaagcccaccgcaagagctccactgtcggggtcttctggctcaatgcagcggaaacgtggatcgatattgtcaagtccactgcctcctccaaccccctgaccttgggcgcccgctccaaaacagacacccagactcattggatgtctgaatccggtcagattgacctgttcgtcttcctcgggccgtcaccgaatgatatcagtaaaacatatggtgaactcacaggatatacacaattgccccagcagttcgccattggatatcaccaatgccgttggaactatgttacggacgaggatgtcaaggaagtcaacgccaaatttgacaagtaccagattccatacgatgtgatctggcttgatcttgaatataccgatgaccggaaatacttcacctgggaccctctcaccttccctgatcctacgggtatgcagcaaaagctcgatgaaagtgagcgaaagcttgtggttttgatcgatcctcacatcaagaacgcggacaagtacttcgtttcagaagagcttagaagcaaaaacctcgctgtgctgaacaaggatggcgaaatctatgatggatggtgctggccaggttcctcgaactgggtcgactgctttaaccccgctgcacatgcctggtgggccacgctacacaagtttgacaaattcaagggatcgcttcagaatcttttcatctggaatgatatgaatgaaccctctgtttttaacgggcctgacatgaccatgcccaaggacaacttgcatcatggaaactgggaacatcgcgatgttcacaaccttaatggtctcacccttgtgaacgccacctacaaagcaatgctggagcgcaaaaagggggagatgcgccggccattcatcttgacgcgctcgtactactccggggcccagcgggtgtctgctatgtggactggagacaaccaggccacctgggaccacctaggggcttctctccccatggtcctgaccaacggtatcgcaggcttccccttcgctggcgcagatgtcggaggattcttccataatcctgataaggaccttttgactcgatggtaccagacaggtatatggtatcccttcttccgcgcgcatgctcacatcgatacccgtcgccgtgagccgtatctgatcagcgagccccaccggtcctacatcgctcaggcaatccgtctgaggtaccaactgatgcctgcttggtataccgccttccacgaagcctccgttaacggcacgccaatcgttcgccctcagtattacatgttcccagaggacgagcaaggctttgccatcgatgatcagctgtaccttgcttccacgggtcttctcgtcaagcctgttgtgcaggagaacacgcatagtgcagaggtatatatctccgacgacgagaagtactatgactactttgatttcaccgtctaccagggtgcgggcaagaaacacaccgtccctgcgccagaggacaaggttcctgtgttgatccagggtggtcacatcattccccgcaaggaccgtcctcgtcgcagtaccggtctgatgcgatgggacccgtacacactagtcattaccatagacaagaatggcgaggcggaaggcagtctgtacgtggacgatggcgagacgttcgactacgagcgtggcgcctacattcaccgccgcttcaactaccgcgactcggtgttgtcgtcgaaggacattggtaccaatggacctaagactgctgagtacctcaagaccatggctggtgtgacagtcgagcgggtggtgatcgttgaccctcccgctgaatggaaggctaagaacatcgtgagtgtcattgaagatggagccaagtcaggctctacggcctccttggagttctacgagcaggaggccgggagggcatcctatgttgtggtgaagaagccgaatgttggtattggaaaggcatggcggattgagttctgattgatatctttcatttcttgcacaatacatgtatgcaatattcacgtcattagaagttgataagcctgcatatggttctttatataaaattgtccgatagggaaaacttaccccttcacaaaatctaacgccatcatatcgaggattacttctgatgcacagattctcacgcagttgttcatcaagaaaccttccagctttgaaattgagatatgcaacctcaatgctaaaagtttgtcctcgcgccgggctgtggtgccaaccgctgccgagtttatttagagtttctttgatgctttcgatcttcctatcgccttgtccgaagcgggccaggcgagtcaagctatcgaatgaccagcccaagccatgtgcggaattctggtggtcttgattatactacggctcgtgcacaaccatatttcccaccaatagaacgatatgaaattctaacgcattcatgtgcatctctcttgttgcagcttgagacaggattcttgagcagacacgacattgagcactatatcatgccaagttaacatagggcttcttggtggaaacatccaaacaagctcgaatgccctcctttccggccagaaatgtgaaatatgtcgcagcttaccatatgtccgaaggagattggagcagatgtaccggataaaggtccggagaaaggcctggagaagacctggagaaggcccagagcaaggccggagaaaggctcatcattgcacaccccgcatgccaacccacagtggttgtccgtgctttccgcagcaggtcggactctgactggatgcctatttacaagctcaccttggcaaagaccactattggtcgcccccacatacttctgggagtcactggatcacgcccttcaatgccaagcttccccgcatttcttggctattggaacgtagacgccaagactggggtaaacaatggcatctgaaatcattccgtcattctatttaggataaccgacatgatataactagctatatccctcgtttggttgacgagactctataagtacaggaccctcgagcgtggtagcaacgattgtatactaccaatccacagctatgaaccgcggctctatcggaaaagacgatgtcgagattgtcgatcaaactgctcatgtcgaacacattctcaagccttctcttgtcactcagattggagactttcgtgtcgtcggtttgacccccgaggatgcagatttctataacaactatccggaggacaaacgaaaaagagtcttccataaggtggaaatactagccattctcatgaatatccacctgactctgtgtacaggtcgataagcgtctgattcccatgcttgcagtgttatacttgatttgccacattgatcgtgcgaatatcggcaatgccaaaatcgaaggcatggtccaagatctcaagatgactgggttgcagtataatactgtactgtctatatgtaagttcatttcctacagccaactcttttgtaactgatgtgtaatggctctcaatttagtcttcattccctacgtcgtgttggaagtccccagtaacatccttctcaaaaggttcaagcgtccttcggtgtaccttggacttcttgtctcggcctggggtattgtcatgacatgcacgggtctggtccagaactttgctggtcttatgaccactcgagtcctacttggtgctcttgagtgagtgacaatgatgaacccctttctgcttcgcattctaaaatccttatagggctggtttcttccctggtgctatttacctttgctcctactggtacatgcctagggaattggcgcttcgtatctcatatttttactgtgccagtgcgctctccggtgcattttccggcctattggctgccgctattgccaagatggacggtattgctggacttgaggggtggcggtggatcttcattctggaaggtcttgctagtgtggtactaggtgttgcctgtttcttccttctcatcgacaccccggctttagccaagcgctggctatcccctgaagaaattcgctacctggagctttcaatgttcgtcaagcaaggaggaactagtactggggagtcgggtttcaagtggagagacctcaaggtggtcctgatgaattggaggatatatgtgcaagcgtaccttttattctgccaatcggccttgtcttacggtaaccgttgttcaaatccgattcgagacattgggctaattgaatttccacccaggtaccaagttcaccctcccgactatcaccaaagccatgggattcagctccacaaatgcccagctcacttccgcccctccatacattgccggcgcgatatctgccatcgtgtttgcacggttgtccgatcgcttctattggcgaatgccatttgtctgcatccccatggtatttgtcgtagtagcctattctattatcctctccctgaacggggcgctggaagcaaaaaaaggagtggcatactttgcagtcgtcttgtctgtcataggtatctatcccattcagccaggagctgcgtcttggaatgcaaacaacatcgccccagcgtctcgacgggctatgggaatcgcgctagtgaactgtgtcggcaatgtcggtggcatactgggtagcttcatgtatatcgagaaagagagccctaagtacaccactggatttggtctcagtttggcactcggtggggttggattcttggtagctttgttcctcgaatggacatacaagatgggcaatgcaaagaaggcaaggattgcagatgatgcaagagttaactacacggaggaagaattgtttgatatgggagacaagtcacccctattcaagtatgttttgtaaatactttgtgggcgggaatgaatttatgatgatgtttttttgatattacgatatgtccgataaaacgctcctgatatcttcaatctaagccagcgcaagcctcttaggcaggtgccatcctatatcaaacggtttcgtgctgatttcagtttgctctcttggttccttccgttctccttttactttcctgtctcccacatctcaaactttttcaatttgccccttctcgttggtatcaactcacttaaagagaaacacaccaccgccaccatgaccaccgatgcgtcaacaaccccatctgagtcgcagctgaccggacctggccctacaagtcctttctacgggatgtatggtcattactggaagtcaaacagggatgtgccgcccaccaaatggctgtaagaatcagtttgaattgaaccgttgaatataactaaccgattctatcagtcaggagagcaagaagctctgcgcttgtgatgcccatcaggcaagccagtggccgatggaacacgcattaattgtaagtggaaacgcccaaacagtccattccaagatgccaatcttcttggccttagacgattcctcgctgcgcctacaagtgtccctactgcccaaagttcgataccctcgatagtaccgagcctcaggtggtgaagctccgtgctcatatcgtacgtgaccatttggtgagactatcattcgtgaatgacttgcggcatactgatgtcgattagaagagaaaatcatatgaattccttgggttcgctgtcaccccggccagagtcacaaaagcccgcgtgccgtgagttagccttgttcaacttcaatcacctacttctaatcccattgattcttctagtaagccatgacgttggtagggttcagcggttcatggtgcatgcattttcgcggttatgggttcattccctattccaagaagagatttcgtaccacaacagaacttcaatcagaacgaatttacgtatctttgtgcttacccttttccatgattaaaaacctagaccatttcggcagaaacatgaattctatatgtaatcccatcttcaggttcctttgttttcgttctcaacttctatgatatcgtaaataataagcatacaggagatacttatcattgcttgtccctctttatagtgaaatagatactcggtataccggattagctagtgctcaaggcaataaaagtgtagtaaaataaagaaagttgtcctttcgaaactagcaagttcaagattcatcattattctcagccatccataaatgttagcaaataagcctcctaataccaccaaaaactagccacataattaaagcactgtgatttggaaattaccaatccgtttctgtcatcgtcgaatcgttttcgtcctggtttggccattcggaacgacccacaagctgccatggagcatagatcatttcttcgtcgatcaagtcaaacgggttctcgaagttaccatctaccaatccccagattgaagccagagagatccgacgatagtgcggatcctcttcctcttccggagggcagccgtcgtcactctcatcggtgaattcggcttcgtcgtcggtgagagtgtcttcatttatgcagcgtttgtattcggcaactatgccgtcagaaaaatcattttccatcacagtatctttcattgcttcttcagaaagctgctgttgaaggtgttggttttgcatttcgagggtcttcaatctgatgtccgtgaagtcgtggctcttcttaccatcctgagagaccgcatatcggattgaaaattcattctttttgttctccgaaatctcaaagctgccggccttctgacaacacccacattcgacagtgcagtggccatttgcatgcttgcgacgatcaccaataaatttgcgatcaaggcaacatccacactcacgtccacagcagcctcctctcctagcgcagtcctctcgaagaacacgatgcatgtaccatttgggatttccccgccagagctcaaaagctcgggtcaaaggcccatcggagaaagagccccggatcgtccaccactcgcgctcaactcgtttatattctttgtttgattcgctaagctcttgttcgactctcgctccacttagctgataatattcccagcgcatttcccgttgagcgatctctcggagcctagtctccacgtcgaggaactccgccaggcgatcttctttgccgtcgaggtcttgttcatagatgtagagttcaaatcgacatcgctgaagggcatttatgtctccagtctgtctgatctcgtgttccaaactgccttccataccacgcgtgaacttcttggatatctccagcctgattatattgggtccggtttcaatttcttggagaccttttatcttttccttgagtttaaattcctccttctcgagctcagctctgtcgtgttggattctaagctcctgattttggagttcgattctgagctcatggttctcaagtttgtttttgctgtgtgccaatgtaatttcatgcttttccacatcaaattccaattgacgccttttaagctgacgctcaagctcttggagctcgatttcctttgcggcttccgccctgggattgctcattttggatgttcgtgcgagaccaacgcttagtgaaatcagatgggaaaggtagataaagaggtaggagaatgtcaagtcggggttttggttagaattcatacatcgacgattcatcgtgatgtagtcccgtatccaatttgggtaacagctttgattatgtatgtttccgcggtcatagttatgcgtccgagataggcaaatgatgattaataaggtccctttattatgattggttaccataacgacaggtgacccacaacatccccacgtccctgccgcgggtggagatcggcacgctgacataatccagggcacccgccggccgcccggcaaaaaggccaagccgcatgcagtcgtgtgtcccgaagcttacgctttttttccctctttgacttcagttcttggttgtcaacagctttttctttgtcgcgaatatttacaatacgcggctccacacgcaatcgccgacccgactgctttttttattttatagcgaccgcgcataccccctgccatgtctcttttccaggccgcctttgactatgccgcacctgtcttgtacgtggtcgtaaatgactgacccacgggttcccagtgctaatcatgctcgtgtgcagccttataagctctccggtcacatcctatgccgaccaaatcttcagcattcatcgctcaagaagctcggcgggcttctccttagacattcctttgattatgctgatctcgtcgattctgaagtaagattccgatcggcagcgggttgatattcgaggcggcagttccatgttaacattattaggattttcttttggttcggcgagtactactcaagaactttgttaacacaagcaattgtcatgatcgtggtgcagatcacgatgctcaaggttgcactcgataatcggccctctgccggggtgagaaatggaattgagcacacacccttcagcggtggtaactccgatggttcatcctcaagaccttatgagttctggcagtggaaggctaccaagccgtaagtctcggcatctccaaccactgcgatcaaagctgattacccattttcgaagatattggatgtgtctagcctacttcgtcggaatgttgaccatcatccaccttaccccggtcgctcaatcgcgattctatatcagcctccttggctacatcggactcgccgtcgaagctatcctccctatccctcaaatcctcgccaaccaccaatccggctcgtgcaagggcttccgattctccgttattgcggcatggattctcggtgacactatgaaaatgagttacttcttcaacagcacagagaccatcccctgggcgttcaagctctgtggtatcttccagtgtgtgtgcgacttctacctgggcttccagttctacttcttcactcgcaacaccccatctaaaactccatcccactcgctctccaactcgctctctaactcgtttgctatcccacactcacactccaactcactctcacacaatttccctgtctccgattctcactcccgctccaactcccaggctgcaagcgagtctatggagaatgaccgctggggtcatcacgagaaggacatccgcatggactgaaacactcgcatgatgaacttggactagacttcatatttatgtagataggtagcattggaaaacagcactatagatctgtaatttgaatgagataatgtgaatactatgatggtttcaaaaaaaatcatttcccggtgattctccgattgcgcgcctggtgaggggggggcttgccccgcgtcatttcgactgctctgctcgaacttctgcgccaacgtcttccccagtaacctcagatctaccgcttgttcttctccaaatcaatagtgcagctgtgtcttacacaatggccgacttgcccacagtccgcattggctacgtgcccggtacgtcagctttcccacagcttccgcatcagatgcaaaacagtactcccgtgtctatgctacagcctttgtctcaacgaagcctgccagtcacttctattgctctcgggcagaatatagctaacactaagcctttgtctactagagcactacctaaccccactccatctcgcactccgttccccggctgtttcttccctcccattcaaaatcgtcgcaactcccttcccatctgggacaggccatatgatcacatccctccgcggcaatgaaattgacgtcgccattggtttgacagagggatgggtcgcaggcttagccgggaagcagcaagcgagtcagacatccccggatgcagatggaggatacaaagttgtcggccactgggtagacaaccccctgcgctgggctatagtcaccggacgcaatcgggacgagatcacgggagtgtcggatctgaaggacaagagggttggagtcagccggttgggaaggtaagctatcaacatgagtcatgagcatagtatagcttggagactgacatgttggcctacagtggctcgcatatcatgtccttcgttcttgcgcagcagcaaggctggaaagctgactctttgaccaccgtccctctgggacccttcgggccgttgcgggatggtgtgtctggcctcgacgcctcaaagcccgaccaggctgcgaacccatcggctgagttcttcatgtgggaggaatttaccacgaagccatacttccatcctacagctgagagaccgaacccgccgcttaagaagattggcgagatcttcaccccttggccttcttggatgattgtcgcttctacagcgctgttccctaaccccgagaaagatcagcgattggagagtctcttccaggctctggatcagggaatcaaggatttcgaggctgatactgcacatgttgtgaagcttttggatactggtgagctcggttgcaattatgtcgaggaggatgcaacggagtggctcaaggatgttaagttcactaatgccacccgcggtgttgatgataagattattggaggtgttgtcgatgtgctcaaggtggctggtgttattgactcggcaatgagcaatgatgaagctatccagcgagtcattgggatcaagaggtagcttccttggccctcgaagacggagaagtcacgatataaacagtatgcagagagatctgctcataataccatccagagctagattctatatatgccgcattgacgtgcacaatgttacggtccttgatatcggggtcctgtatgcatattcgtaatattcgtttcaatgggataaggtcaaggccccgccgctacttcattgctaagccatctctcatatccgagcctgattgtttcaaaaggaaacctcactcggtcggctcagggtagcgctgtagccattcgtcctttgtgtagagctgccctttgtcggtcaggaaagcagtgatctttttgttgagttctttgtttaatcgttagcaagaacttcactttgatatcagaggtctattacattctactgtcatttcctcctatgcttgcaatgagtaatagttgcaccccctttcacaccacagagagcaccgtcgataacacctttcagcgtatcacatggcaatgaaactgtaaccggtgtcatcgacacgaagactctcgtatgttgcactgagatactggggtaaccaggtcggatcgccaaaagaagatcaaaaacaggaaatgaggaagattagacagtaaattgaggatgatcaagagagctcagatatgtgaaaggtgaggtaaatgtgatggataggggagatgggaggaaaaagagagaggagaaggagaagatgcaggtgcgtttgacttgttaccttgttgagacgagaatctcgagaatagagatctcatcgtcaactactacttcaaaaactgctccaacaactgctttaactactatttcaacaactacttcgacaactgaagaccgagtcggggcaatgaacagtccttagatagacggtagactttcaccttttgttcaaacaatgtcttccactcaaaattgtcatcggccgaaaaattcgaaatggttggcttgcggacagcgatacaatgaacgcatcgcgagcgacgagttggcgaagaattttaccaaaaagtagaaccggtaagaataatctcgattcctctgggaaacttgcggctatacttccatgaatcgggctttcggtaagtgatccgatgcattcctgcaggaattgggtgttcgaaatgaactgggaatgccctcgtgtagcatttgacgctaacccaatggaataatactgatctagatgtgatatgtacaacatagtagttgcattctgcaggggaatagcatcgaattcatgataaataaaggttcggataagccgaagcctgaatgtttcgtactcaagtttgtcagttatgtaggttgtggtattgggtttgctgatatatattgaagagcattggctggttgaatcttctatacaacggtgctctacatttaaaattgttatttaaagaaacctagtctaaaattcagcaagaacttaattctttgacagaaacaacaagctaaaggattttagcacaaggtgaacagttcgtcttgaaagggccaatggagtatagttcgaccaactacaacataatgacgaccaccgagatgaccacccagatgacaagggatatgacgtgtttaccaggcataggtacggtctctatagcagcagagtcaaatgaggatggcctagaactaaactttacatccacacatgctcatccctcggtgcattcttagatctgccctcagtcccccgacaacaacactggaatgcacaccagggcgcgtgaaacaccccacaatccaatcaaaatattcacctggctaaaccacctacacaaaccatctattcgggaccaaggaatgaccccgaacctccttttcgattgttagcgtggacatttggatcataccatgcgctgcgggcaccgggtaagcaagccacttgaatgaggaacgcggacatttctttttagaaaataacaaggacaaatatgtatatagtatttaacaatgcactatgctcattcacgatgaggatcggtgttctgactctcctttgtcgtttccgtccctatacatcctccaatcccatatattaatttcttcctaatacctacttaatctaacgcgagcagatactgtactgcgctcgtcactatgcgccggtatctgtgtcttcttgcttggtctattttgctggctccattcggaggagcacaggcgaagctggacttaaactcgactagcaacatcgttgtttactggggtatgtgcttgttggtggtttggattaattcgtacttacatgagacatactgaaggccagaattcattcaatggaaagggggatcaggcacagcagcctcttgcacactactgcgatagtgagtgaatgatatatcttcaatgtggtcgttcaaactaacccgagcctctagatgaggacattgatgtaggaactaggtcatcaggaacgctttcaaaacaatgggctaacaaaatggcataggtgataccaatggccttcaatatgatggtcaacggcccaggaggcgctccagagattgatttctctgttaccagcaaggactgcgatgtcttcgaaggcacagaattaaagaactgtccttcaattgcgtaagaacatatcccgtccgctgaccatttctagacggctgacagtatctaggaaggacatccaaacgtgccaaaagaagaacaagacgatccttctttcaatcggtggagcgacctacagcgagggcggcttcaagtccgacgaagatgccaaggacggtgcgaagctgatgtgggagacctttggccccaagaaagagaattcaaccgctcttcgtcccttcggtgacgccgccttggatgggttcgacttggactttgaggccaatgtccaacacatggcccccttcgccaacgagctgcgctcactgatgaaggcggataagagcaagcaggatttctacttgacatcggcaccgcaatgcccctaccctgacgaggcagacaaagagatcctcaacggtcctgtttacattgacgctatctgggtacagttctataataactattgcggcgtcaacaatttcaacaccgacagctcaagcaacaaatacaacttcgaggagtgggacacctgggctaagaccgtgtcacagaacaaagatgtaaaggtcatcgtcggcgtcccagcctttacttctgcagctagcacggggtatatcccggcgtccgagttggccaaggtgattgaatacacgaagaagttcgacagtttcggaggtgttatgatgtgggatgccacacaggcatacgaaaacgatggatttatcgaggacgtgcgagaaagcttaggttctgcgaatgattccggttcgtcgtcgcccgacccggtgtcaacctcggcatctgcctctacgtccactgacccaacgaagacaaccaccacaactaccacaaccaccaccactacaaccaccacaaccacgactacgagaacgacgacgacgacgacgacttcgccatcttccaatgcacccgtctcttcacactcatcctcctcctcctcatctgcttctgcttcgcacaagggagctgaagaaacaaccaccaccaccaccaaagaacataagcctaccgttacgaccaccacgcaaaagcctgtcgcttccactacccaaccaaaaccgactactatcgtcactacaaccgcaaagcccaaggcttcctcaactacatctgcggagacaactgcgactcccacctcgaatggtggccctaactcgccgagcgacgacgataattcagacgatggaccaaatgatgagtcgggtagtaatctcctcggctctatcctcgggaacgaccttcttggtctgctgggtggcctccgtaaggcgaacaaggctgctagcggtatcacccatggtctagccaacaatctctgacatgctcagcgcaactgcgcttggggttatgaccagaactgacatcgccataaacaaggccttagggagctgtgtttctctggcaatgaatgaacatgattgggccgttgagcgcatataaggaatttttacgatgaactcgaggtcaatttagacccgattcactcccattttgtcctttgaatcttttgccttctttatacccttcgatcttattactttcaactcatctaatgtcttgtttaccctttattcgataccctatttaatctttccctttgaagcttggaaaattgcaccattattgttgctttgtgtctttcacaaatgcgatcatacaatggagacactattggattggactcaaaatatatctataagctgacaggtatcatatggtttccatctatagtaactgattgaattcaaaagagataactagaggtatttgagcgccattaggatacttgtaagcagattcaacacattagagattaacatagacaccctcgtgctcttgtacgttgccccccgagaacacgccataataataacgttcaccatcgacaatacctaattaggccaggaacagaacgaaagacaactttcaacatccaatgatagtaagatccggacatcataccttccactcgatatcccaccccttcactcagcctcctcctcctccttggttgtggccaaggagaaccggcccttcgtggcgcccgattcctcgtactcaaccgtaacacgagacaagtgagcaagcaggttctcaattctgatctcacccttgtcgcgcttggaacgacccagattatcgagccactcaatcttgttcaagatgaagtatactagagcgataacaatagaaacaccaagcgaataaccccagattcgaataacagtgacgatatcggtccagccatttgtggtctcaacaaaatggtctgcgggcttggttggcatggtttggttggtaaaccaaccgaacagacagtagatcgtagccaaagcgtcgacgccgaggatagcgactaccaggtggattgatggccatgtgtcgatgccgcgagtgacgaaaattagccaattctctgtgagtgccacttccaaaaagagaacctcttgaatagatccccagttttggataatgcctccgttcttcaggaacatacttcctcggataacccacgtacccatggcgagaagcacaccaagaaggcaggaaatgacccagattttgggaagttgccattccacaggtcgcagctcgaatgatgcatggtcataggcaactgcaacggtcgcaagatcggcgaacaatgccaggaagacaataagctccacacggatgctttcattgaggatgatcatcgaagtcacgaggtagatctcaaggtgcaagcagagtgcaatgcggtattgaatatatgacttcatgcggtgaaagatttgacgtgcgaccttaatagagtcaatgatagttgaaagaccaggctcgaggaacacgatgtctgctgcggactgagcggcttccgaggcaccttcgacggcgatgccacaatcggcttttttgagagatggtgcgtcatttacaccatcgccggtcatagcggtcaagtgccctcgttcttgtagcatttgtacgacttggtatttgtgttccgggaacacttcggcaaagccgtctgctttttcaacgagatcactagccatggcaccgctcaaaccgccgtggattagcttgtctgagttatacaccttagtacccaacgccaacatcttgcaggtttctttcgcaatagcaatagcatcaccggtaagcatcttcacgctaataccgagattctgcgcttcgctgatagtttgagcggtatcttctcggggcggatcaaacataggtagcattccaagcagagcccaatcctcgccttctttctgaacagcaataccgagagagcggaagcctcgatgcgcaaattcttgggctttggccttgtataagtcagctgtctccttagagcaacttgtcaattgaagcacggctttcggagcgcctttggtgcaggtataccgaataccgtcacaggtggcaatagtgacaatgcgttttgaaaccgggtcaaatggcgtgaaagtttcggttgaccaaccccgtcgcaggatttctcgtgctcttggatactgcctaagcgccaagattgtcactttatcaatcggatcgagagattcaatattgtgcgatgacgcgagagcagcaacggcaaacatccagtccacgtcgacgccttcagctacataaggatcacgaatactcagtttgtttgccgtgagtgtacccgtcttatccgaacacagaatatcgacaccctaattcgctgtcagtatctcataatagtccaatttgacgcagacttacggccagggattcaattgcagtcagcttttgcacaatagctttcttctttgccagataggcagcaccgacagccatggtggtagtggtcacaacaggtaaaccgacaggtacaccaatgatcaacaaagacagagtgtagtgaagcaaagtctgttgaccaggtgaagcgataggaatatgacggaagaatccaccgatccatgcagcaaggatccaggccataacgagaatcaagagagatgttccaatattgtccatgacaagttcgaagtgaccagcgcctttagcagattgcaccatagttgcagtgcggccaacgaaggaagtggtcgcaggcgtttgaacgacagcataggccttgccacgcttacagccagttgtatagaagatcatatctcccatgtaacgatccacagctagcgactcgcccgtgatagcagagtgatcacaagctaaaataggatagccacgtctgcgagccttcttcgcctggtgttcgtctttttccttggccttgctctcgccttctccgccttctccgccttcgcccttacccttatcggtattggttgggtcttcctcttcatcagactcggaccctccaccgagcataccctgctcttgaagctggttgaactcttcccagccatgttcatccttgacatcacagatgactctggagtccgcaggcacgacttgaccttcaccgacgatgacctaaatgattgataagaagtttgcgtataccaatgttccagctcatccaaaatagacttactacatcgcctggaaccaactcccgagcaagacattcttgttgagtactgtcacgaatgacctgcgcacgcagggcaatatcacccttgagactcgcaacaatatccgcagcctgcttctcctgataccagcccactgccgcgttcagacacaggataccaatgatcacaccaaaatcaatccagtcctctagaccagcagcaagcagaacagccaattccatgactatgctccagtcagtgcggtaaccaagggaggagttatatgcactcaccgtagagaattggtccttggaagtaagaaagaatcttagcaataggattttccttctcggatgtcatctcgttccaaccagcccgacgccgacggattggcacttcatggctagaaagcccctctcggacatccgtcatggtccaatcatcgggaaacttgccaacctccccctcgacctttttgacgcggaccttatgcttcttccacggggcataccagactcgtttctcgaccaattcgccctgttgttgatccgccgcagcatcccggaacgtcgaaacgtacttgacaagcttgccatactcgtccagactgttgtagtccccgctcagagatgcccgggagatacgtgagctccggcggcgagtctcggcacgttcggcttgaccgtcgccggacatgtttggctttataaatcagatcatagtccttccagtacaaacaggccagataggcacatacctttcaggagacgagatctgataacaaaaatgaatgcacgaagcaaaaggggaatatgaaaatgaagcaacaatgaaaagaaaaaatgaacttttccaatgttatattcgcagttcggcacctgcgggatgtcaagtattgaagatgagtgcaattttatctggagtagaaaagaagagaagtagctaggtagcgtagcgaaactatccaaaagaaatcatgctgacgtcgggccaggaagccctcgggagagacatctcgcatgtatgctcattgttttggtctttgtactcggtacttgaaggatgatgaaaccagggaccaaaagccggggaaccaggtctccaaagggacgagccgcggataatccgaagaactcccgctgggtcttgatgcatagaacattggttcgaccaatctagatgaagcccataacatcatagtcggctctaagatcgaaagaagctagtggtccaagccaggtacccgaattgacttcgagacaagggcattcacccatggatcgtggaagatgtttcctcggcgagggacatcacgacgatgggaaaggggtccaggtcgtgtgtctgcggctgtaggaccttgtgctatactgatgttcctacaggcatcaaaggtcttatgcggagatgatcatcgatcagtgcatccagctatggcgggacacgcattgggcgttgaacaccgtagctataataccattcgaagctatgaaccagaaagatccggggtgctcaatcaagcataggtgaacgaatgaactaggcccgtttctgctgtagagggcgagcggctgtccggatgtcaactgaagcagcaggtaacctgcgacgtcatgcgcatccattccgctgacagccggccggcggagtttacatccattccacgccaatgtttctgattcgtcaaaagaaatcatatggtcggaaatcgaaccgaaagtataagatggttatgagcaacttgctagcgagatcgttgcagtggagctcggccacacgtgaccctgttcagccctacacgcgccattacaacgcttcccagaactccccgaactaccctcccagagtgggtatggtatcgtccgatggcctttacctgcattcaaatcccgtccgaatgccctaacaaaaaaagcccctggataatgccaccaggtgccctttcgcccaaggtagcccttcgtagatgcacagaggatctatattcattttactgaacgcaagtggaagcatataaacaatctttcattcttcttatcatggatcactcataaaacatgattcaagcataactgacacagtatctatttggtcttgccggaaggaatgttgaagaagactgcaggcttaccaggggagtaagcacggtccacgcggtagtagcccttacggtcgaactgaatgatatcgctctccttgagatcagcgacgttgcagtcggccagacccgcctcacggaactcggtgtgcaggttgaggaagtcctccaggacgtcatcctcaccgagagaatccttggtcaacaagtggtcaaagtcgaccaactcgacaggaactaggtcctgtccctcggtggcaagccaagtcaccttcttctcggtcttcttgacatcgccagccatgtgcagctcgagctcaagatcggtaatgatgccggtctcggggttcgtggtgatcttgcgcacgatggcattgccccagttcataagagtgatctcctcgtccggcttgaagagcttgacatcctcctgctcgagaatgatcgagctgctgtagacaaccttcttcataccgacggcggcgttcttaatgtgcttaggcttttgctcgctgtaaggggtagcagggccaccaatcacagtggtcttcacaacgttcttggtgaagatcgcggtgtggcgtggggcaataggatcaatgtatttcttgttggtagcccagataagaccccagtcgaagttggtcacagccttggaggggccctgcttgaggatgaattcccggagagcaggaatggtcataccgcggcgacggataccacgaatggtggggaagcggggatcatcccagccccaaacgagaccagtctcgaccagcttggtgagcttacgcttagagaggagggtgcggacgaagttcatgcgagcgaaatcccacacctgcacgttgcgcagcttcatagtatccagcatccactggtactgggggttacgatcacggtactcgatagtacgcagagcgtgggtgacaccctccatcgaatcaacaatagggcaggcaaagtcgtaagtcgggtagatcttccatttgctaccggtgcggtggtgaggtgttgggttgcatcggtagatgactgggtcacgcatggccttattggggcagtcgtaggagatcttagcacggatgcaccaacgaagaccctctggggtgctgttcttcatatcctcaagatgcgccaagctttcctcgggggaaagatcccgacgcttgctaggcaatccgtcccatctctgggcagccatggtttctttatcggtatcatctgcgtaggcgtcgccctgtttgatgatctggatacagtaggcgtacaactcgtcgaagtagtcactagtgtaagtcaacttgttaggcttgatgcccatgagcgcaaggtcctccacgatggcatcctcgaactcttgcttctcgttcgaggggttggtgtcgtcgaatctagtacaagtcagttcagggtccttgattttgtttgctatttgtcttcaaccaacctcagaagcatagtaccgttgtacttctcatgcgcaaaatagtcgttgagaagagcggccttggcgtgaccaatgtggaggtatccactacattaaagcgaacgatattagtctcagatagattaaacaagaattgggtcccaactcacgaaggctcgggagggaatcgggtaacgacaccgttctcggtgttcttgagcgcaatgtcgtaactggcgccctccttagacttggccaccttcttctccttagcaactgcgttcatggattccacagcggcgggagcccaggggcaaagctcctcaatgaacctaaaccagcgggtaaggttcacaagggatcccttcttcacggccgcagtggcgacacgattgcctcggatagcaccccaaagggcaatgtcgggggtcgacagagagtatccgaccacgaacgagcgcatgaggaggtgagtatcaaggcgctgaagcacgggatcgagggccttgaaatccaggatggtcagggaatccaattgagagatccactcagtctcctattgcgaggaatagtgttagggttatttcggttccaaaaaaaagactcgaccgcggggtagtgactcaactcaccaccttggaatctttgccagtcaggaaagggaagtgcttagtaagttcctggatgacattggcagtaccaaagacagagttggaaccactagtgagctgcacgatggccttgtcgccatcctggagaagagcagtgtcctcatatgtgatgttgatcacgggggtgggacgggcctcattgatggaggtgacgatgagaaccgcaggcagagttgcagcctggttgccacgagtggccactttcaactcgtattcagacatggcgcagaagtgtagtgttaggagcaatgtgaatttctggcgggggagtcattatctacagtccccgtccggagccacatttctccgaccccgactgctttccggcagaaaacaattgcttcatccagccgatcagctcacatcaacgcttgccaacatgtcgtcctccggctcggtactgcccagtgcggcacgaggaatcctatcatcatgccggaatccgctgcgaaattcatcaatcgctcccgttctctcgactttccagcaggtccgaggtctcaagcacaaaccaaagaaggggaaagagcagcctaccaagagccgcaaagcaccccaggagttccggcaagccaatttgaaggatatgccgcagtattccctgtgtgatgctatgcggtatgtactggacacagatgtcagccaatagccgggccatcaattgacaccttcctttctgcaggtatatccgggccatcgaagtcggtcgcgagcccaccgttcaaaaatacgagctgcacatccgactgcggacaaagcgcgatggtcccgtcatccgtaacatgctccgattcccgcacgccgtccagaccgaatcccgcatctgtgtcatctgtcctcccggttcgaaagcggctaaggaagcgcttgctgccggtgccgttctcgtcggtgaacaagaagtgttcgacgccgtcaaggcaggcactattgagtttgatcgctgtctcgctcacccggacagtttgccggcattgaacaaggccgcgctgggtcgtatcctcggtcctcgcggtttgatgcccagtgcgaagactggtaccgttgtagaagatgtggctgcgcgagtggagatgctccgtggtggtactgtgtacagagagcgtgatgctgttatccgtctgcccatcgggcaattgggcttctctccagaacaattgcgcgacaacatgcgcgtgacccttgaccagattaagaaggatgcttccgcgctgaccgaccgtgtcaacaaggaggtctacgaggtggtgagcacttaattgatccttcttgtggaaaaatctctaacaacaccatcaggtactgagctcgacgaacggacccggattctcactcagcggcgagttccgctctgacgcctctcccccaacctccgccttggccggcatgtaacatactcaattttcttatatcctttggcgtgtacaaatttattgttttattaggaaaggacatggtgtatcatggtatcattgttgaactagaactttataagacgaaacgccgacgctatgtatgcaagccagtgccgattgccaatttccaggaacatgcacgttgtttttacagcttgaggttcttcagcgcggcaacggcactgacgtcctcacccataagctcgtagaggcgcagaactgccattgttctagcgtcacgtttgccctgtttaccacctgccgtggcctgctccaaggcagttttgagatccaggagcactgtagacttgatctttgcgactcgtggttgctgcgcaagcaggaagggatgcttctcgccgacccgggcagctatcgaggtcaaatagacaaatttctgcgcatgacgttccatcctctttaatgaaattgcaggtgtgccatctgctagctcataatcctcgctgtcttcactctcgccgccgtacaaatcggactctgtatctgattcgtccgatgtggcatgttcttgcgatgacttgtcctcaatcatcaaacggtgttccaactcctccacccgatctgcgtagtccagcaggtctttgccaatgtcggcgttctttcgtagtcgccgcttttcgttcaacagctcttccacttcctggcgtcgcgcctcgaccttgtcccgtatagccttgacgtcgcgctggaaagaaagtacgccgacttttacaccttcgactttctcctctcctccgcggagcgcgctgcccaacgagagaaagtcctggtagttctcattgacaagatccaacagctccttgttcaagaattgctccagtccccgcaattcctgtcgcagatcctcgaggctttgatgtcggtttgtcaatgacgagaggaaattggctggatcgaagtcaggggcgaggaatgaggtgcgagatagcggttccgggaaggggagaccagatgggtcttcatcgaagtcggaggaggacccgtcggagtcgccgaactataggtcggttagacgaggtaccaatttgagtcacatgggttcatacttggaaccgattcatggtgcgttccgggcagagcgtgagcaatgatgaaggaacacttgggaaacgtggtggtgtctatgcctcgatataacttacatacctgttgagcgtgtcatcttcatgtttggaaaattcattatcagtttggctttgtggcccagtggttaaggcatcccgctcgtatcataatggtgcaaacgggggggtcccgcgttcgactcgcggcagagccatcctatttttggctttttttgcatagtgtacctgaggtgcctgaaccacactgacagctttggtggtcatcagggaagctgtccacccctcggatgatttacatcagacaaaacactcaacgcatgtcgatgaatatgcattgcgcatccgacgtggatacatgcgaaacctaaccctctcaaagtcctgtcccctcccagagcggggtcggtgtctgcgctgtctcctgcattacacgtagctgtgcgctaccgcaaccggtacagaagatggagtcggagacattgcccggtacaaggccttcgtcttccctacctcgacaagcatggccccgactacgatccctatcccatgcttctcaagttgtgcccgccgtcgacccatcacaccagacaaaccaacggtaccagtccatcgccgaagaccccaccgctgcatatcgtgctacggctttgcgccaactaaacggttctccgaggcctgcatcccgtcctattcgagtcgataatccctctgcccggcgcttgtcgacacctgatagaggcccggtgctagtcagggcgtattcgggcgatgcgcagaatagatctacacgacggtctactatgccctcgcgtcggttcctctcgttttccagctcgaggagctcgcctcccacgcgcccgtcccagtctgatgtcatattcccgacggataaggacttcagtattgagagtatactgcaggccatcgagcctgatatccgtggcactctggattccattgctgagatctgtgggcggagcaagctgagtctttccaacgagtacgggagccacatcgcgcctttgggtgagatctgtgctccgtcgagtgcgctgggaccggttgaggaggccgggccgagtgaggaacgacgtgccgatgacagcaatgcggtcattgtcgacgaggacgctagtccgactgattcagctcaggatatgcatccattctcctttcatcggtatctggaaaacctgcggcatactgcatctatgcaggagcagagtggtacacttgaccaaataactcagcagccccattctccattttctccgggcatggactccgcagcggaaactattgtgcctatcgccccggtcataccagcgacccctttcacgcgcgaattcgcatcaagacccaagcataacggacgtgatctacttgcgaagaatgctcctgctggcagtggtaaacagcagtcatatcagatggcgacaccggctgttgtttcggaggttcatctagaggcgattgcaaatgatggatcctccgaatccaatattctcccgcagtccgctctcggcggggaaagctcgggtccggaaatcactcaatccctcattgggtggctgaagtgggctgccactatcgctgggccggaatccagtcctgctttgcagtccgcggagagccggctgcgagctatgcttgatcgatcaggcaattagggtctccacagtgccttgatcacgactcatgttatgagacatgataatgactgatgtttacgatcttgcaaacaagattcacgatactatcgacacatctcaacatggttttgtttctaacaggttatgtttgaaatgtcggcttgtagacttttggtagtatacttactgctgggtattttattctgaaatttgcctagaaatattgcctgggaggatcaaaagaaaatatccaaattattagcatcctacgtcatcaaaggatgttcgcaggatgccaattattcttccctgttgtactctacgtccccagaatgactggttttcgccacattgtttacagcaaaagtgataccaatatagcgagtttcaatttgactcgagtaatggaggctaaagagtgaagcctaggacaaaaatctccaagaagtgccatcggcattaaaagcccaaggcaaagttaagcagaagccttaacctcaagacgcttgaaaccaccatcagcagcaacctcctgctgaagtgcagccatgcgcttctgatcaccaataggatcagtagagtcagcatccagaccccaagaaaggaacttattggtgtagttcgcgacgaagtccgcgtccaagatcccaagtctctttccatagttggtaaccttagtccagtcccgctgaacattcttcagatcgcgcgagaagtaagcaaacgaccgctcaaagatcttgcggttgacatccgtgcccatgatcggcttgacgtcaatgtactcggcgtacgccgccgcaggatcagcgaggacgtcgtccgtggcgcgcttgacggcgcgcatgaatgcagccaccttctctgggttcgcggcgatgaaggcgtcgttcgcgatgtacaggatcgagcagaagcagcagcagcccagctcggcgagctggtcgatgcgcagcatctggacgtcgctgcggggtcggttctggccggcgagccattcttccagctcgaccatctgcacgttctcgagaccgatgccggcatcgattgtgccttggatgatggctttggttatgttcattccgcaccgcacggctgtgtagtcgtcggcggtcatgccgtagtacttggtgagttcgtcgatttggatctggggttggttgttagggtttgtttggaattgagtgtgagggagggaattcataccttgccgaactcgccaacgtatccgattcgcttgcctttcagcgagcggaagtcctcggtgataccgctggacttcaggtacacgactccggtgaagggctcgtcgaggagggagccgatggaggtcacggggaagttgcgggccttggcctagacgtggtattagtatggttggggtgactatcatctgcggggaatgtatacgaaccgccagggtgtgaatcatggccttgaagcccatgtcgaccttgccgcttccgatgatctcggtgacatcggaggggtcattaggctcgagcagagcgaccttgagaccttcatccttgaagtagcctctggcctgggcgaggtagaggggggcgtggtacggggtcgcatgcctttgagaaagaaaaaaaacttagccaagtcgaactacaagatcgagcacgggaagcccggaagctcggattctggaacaatgtcagcgtaccagttggtcaaaaaagtgatcttgtcggtagacatgatggcagaaatatcaagctattgaaatacttcaattgggtcagcatgccaagagagaacgcatccagctctactctacccatgctgttctccgttcaacctatgtattcaattgaacggaaagcagcagtgtgagtagagccagacacaaaacacaaaacaggggaacaatcaaagtcacgcatgtcctttcgctagtattgtctagatcaagttttgacagtataatctcagaacagccagccagtcggtatgggaaaaagaaacccaacacactccaggagactggagtaggtttatagttctccccaatcgactggctggaccgaacacctgtcatgcgagggcaacgactgttatacgaacaaataccttgatccatctcttcatcttagcgaggacaaagtcctgcgacccaacggggtcctggacgtgcgcggctccattggagagtcgtaccgatggtagacgtgagtcgagttggattgaagttggattggagttgagtgtaggaatgagagaagatggaggggcaggaggggtagaaataccacgcagaaatacgatgaatcatacgaagtacttcgctaaaggctggggccggaataatcgactgtgattgatcaagttcctaactctatactccgtacggagtattcacgccgggttaggatgcaataggatgcaagtgtcaagtggatagagtcggagttcatccctccggattacaacggatatcctcgcaacgtataacttccatgtgattcagtttaattaaagaacaatcataggcttcagatgcactgctaggaaaagatcatataaagcagagtgattaaacaagtacagatgacgtcacgagcagagtgtccactccaagggccaattgtgaggttgacagctaagcgacagggttccaacaccctcaactagtctgtccgatatccggcgtcggacccttcgcggccgttgaccgatatactgtccagtggggacgatgagcgttcggccatcttgcgggttcgcagtgtgagggggaagtgctcttcgggctcttcctcttcactatggaatgtattagtatttgacaacatcaatcatacaatggaacttacggcaatttccaggcaatataatcctcagtgctcaatccctcgtggccttcctgcagagaggcaaagtcaccgggagtcatcatcccggagcgatcccggggagatccaggaaccgaaagcgggcgggagagcttctgctccgttcctccaatgatatcgaagtagtcctcttggccctcgaaggaggagggataagctgtaaaaaaagaattaatcataatcaccgacaacataaaaacgaactgcaacatacctcttctcaatgccagctgacgagccttgacatattccaagcccattcttttccagtcgagcagatcgctcaggcgctccgtacggttacgctggttaatgcgctggcgacgactcttctccgtgaagttgaacataaactcggtcagctggttgaccgaatcgtcaacgcccttggagcgacggtcgacgatgtaaattccgtaatcggacgagttttcaatcaattcctccatatagcaaccgaatccagacagattggtggtgatgctaggcacacccatcacggtacattcggccggtgtgtatccccacggctcgtagtaggaggggaagacacccagatgggttccgcgaacgaagtcgtcgtaatcaagcggcaatacggggttggcagagttgaggaattcggggtggaaaataaccttcacccggtcggaggagtggttgaacagctgaacgcgacgcagctggttcaggattgggtcctcgtggtcattgaccatgttgtgggtgacgatagggggcagaccggtgcgcttcatgccgaacaggcgacggcggagcatcacacggtcttgactagtgatgagatctttctcatcgggcatgttgtcgccctccttccaggaaaggcagcgctcatacatgcgcttgccgatccccttctcgatgttctcgacggtgtcgcgcagagacttgacgacggcctgtcccttgagcgcttccactgtcaacgaagaggtctgcgcgggcataataatgaacgcgacgacagtcatcgttgacccagcggccttcagtcgatgattgaggcgggccagcccctcaatgaacatatcgacacccttgttgcggtattcgtaacgaccggcagtgaagagatatagagtattatccaggtcgaagtcgttgtggccgtagaaatggccacgaacgaaatcgttgatcttctccttggcctgggagtgcaagttctggaactcgtgcatggcagagaatttcttgacattcagaccattaggcagcacaccatcgggtttgcgcttcagcaggtgctcactctcaaacgcagtgatgtgcgacacagtggtgaagacatcacaggcatgagtagcagcgcgctcaatgcagtagcggtggtagattcctcgcttcccggcctccgcatccacatcaaagtactgaaggttattatagaaatcaaccgagccagcacagaggtaacgacccaataatgtcgcgtgggtggtgaagacggttgtgaggtccatatgccgcttcttggtcagtggcagagcgacaccagccaaccattcatggaaatgggcaatgactgcccggcgacggtcatgagcaatgtactacagcgagagcatggtcagtcatgcacttttgccatctccaacgtagacaatattgctggtacgtacctctcccaagaaccaagcgaccaggtatccaaaaacgatggcctcgttggtctcattgtcaccagcgggagacgggatggccgaggtgttccaaagatcacccttccactcgtccagccacctatagccagtccccgtatcaatgaggagaactcggggagcaccctcgatgagccagcgaccgtagacgatgtcaatgccgcgctctttcatggactgaatcgtgtcccgcatggccgggttggacggcgagagctcttccacctccacagcagccgaagccctgttgagagggccgatcatggtgtaccgctcgccatactcagcggtggtcacaggcgctttggacttgagaaccgagtagatcccgcctactcggttcgccacctcagtagccacctcgaagagcatgtgattgcgcacatcacgcttgatgggttcaccattttcctccattgtgctcaaggccacagaaatcacagaaacacagaaaagcgaaagaaaaatgagacgcgagaatgggggagggttggacgcaacaaccttggaagagctcttcgactcggtctgtgcggggagaagtggaccttttgccttgggctcttctgggggaggctggggaggagtaggggggcaatgtcgatcggactgaagatgttgaagcgaaagggatatattttagagcagagacagcagcacacggagtacaacaattcccgttcctcgttccggtcaagggtttttctccggactggctgacgggtgtgaccacaggactttttgccgcgaagaagtctctgttagggaaatcccacccgagactgaggaaaagggcgtatgatgtgctcaggagattttatattaatctaatgtctatccatggatacaggtctctttgcttggtatgtaacagtcgtagcagtacccaagtggcatcgccatcgccccacgccgtgtactcgcctctctctccgttctatccccgatattcccctttctcctaggtttcgcccggtttttccgattattgggcacctgatctgcatttattcgccttcaatccccgtctccaaagctcagggccaatccaattgcagtttctcttcgggtctggggaaagctggagccatgatgtcatctcacattctactccactgaacggcgtcggagggacccgccggagcttgatcttctacaaatcgccgaccaagctggccacgaatggcttgagatggcttcaaccatctgcatttattggcggggaggacgcgcgggccatgttggaggggatgatcgtcttggcagttatccaattccctcattggcgttgagatatgcctataccgtatgacatggcagatgcaaactactttttttgtacaacactgtgttcctggtctctacctaggttgccccctgcctggtcggaggggaatatctccgagatcctgcaatgtttgacctacctcaaggatgcttccaccggggcagtaccagacaatcatgtccacgatgtttacggatagattctgcaaaagaaccccaggatgatgaagccgctttcttttaccctgctagctgcctacatgggtaggtagtacagcagttgactcatcatagtagagacacttgggaacaaagagcccatcgttgacagaatcatcaacaaagaacctcaaaagtcgcagacctctgtttgttcccatcctcattgtaactgagatggagtccagtcctcatacctgtagagaatgttgtgttacttgctcgaaaagcatcaactgaaaggcccattgatgtcgatctcggagataccagtataccagtccagagaaatataaaaagctgaacgagatgagacctgaagaaagacagcttctgcatcctcccgtccttcagcatctctctcttctgatcaacccgacttccgatcttcaatcatccgtctcattagacatgtctgagaagcaggcgcgcaagagggccaagatcaagcgttggttgagaagttgggtattcactccgctgggtaaggtgaggatcaagttgatcaacaagactgaacggaagcgctgtcgaagtatctcggaccgtgagctcaattggatcgttgatggatcttacgctgatcgatatccgtctcgcttttatcggggccgcaatggtcgtcagttatcgagcccagcgaggaagaggttcctgctcgagactgaggataacctatctctagtagagcttgtgtttcctatgtccacacggtcagggagttcacaacaccagccttctagacctggcttttgtgacagagtcgaacttgctgtgactaccgtccaatctgattatcttcatgacccccgtggaagctggcgagggggtgaacattctgcgctgggaagcatgaatccggacttggctgaattgagtagtgacggtgaaaggtctaagtcaggccccgtttgtgtatttgaggttggtagaaatgtgtacgagctttccgcagttaaggtaatgagcccaaacttacctgcagagttaagtggtggaaatcaatctgggcagtcaccttccctttatgccgagtctgacggtgagatggccaatttctctgtggttgaagagctgcctcctcagcttcccgatttgtatttcatccatcaacccaacccaccattatgctgtctcatcagttcagctcttcagaacttgctctcaccggtccctttggagaacggtatctgctcctgtgtaaaattctcacacagtattgagccatcgattcaacatttgtcctcggatatgtcacggtcatccatcaagagggccaagccccggatgaccaccgcagaagtcctcattcgctatgcaaagaaaagacgagatgccatcataaacaataggtacatctcaccatatgctcctttacaaccacgaccactccgaattcggaaagataataatgtcaccagcgaaccgcagcatgatgtcctgtccgccattcccgtggagacgtctcatgaggtgacagcaccagtgcatcgtccacgatacagtctccgccgtaagatttttcacggcgcattacctcctctacctccttcggcacctacctcccgtccattcagtggttcatccattccatcttcttcgtctgaaccagcaagacttagctctcaggcccttggcatctcatccactcctgcatcttcatctcgaccagcaaccaatggtcttccacagtaccctgaccggcgaacatcgatgtgcggtggctgcctagaaggacgacaccgtcctctccacagccatccatatcatcgccatggcgacaacaacccgcaatctggaagtcccccactgccatatccacttagcccgcgggaactcctaaaccgcctcccacctggaattgattatgttccaccttcgctcatggctggccccccccgccccgccccccccacnnnnnnnnnnnnnnnnnnnnnnnnnnnnnnnnnnnnnnnnnnnnnnnnnnnnnnnnnnnnnnnnnnnnnnnnnnnnnnnnnnnnnnnnnnnnnnnnnnnnnnnnnnnnnnnnnnnnnnnnnnnnnnnnnnnnnnnnnnnnnnnnnnnnnnnnnnnnnnnnnnnnnnnnnnnnnnnnnnnnnnnnnnnnnnnnnnnnnnnnnnnnnnnnnnnnnnnnnnnnnnnnnnnnnnnnnnnnnnnnnnnnnnnnnnnnnnnnnnnnnnnnnnnnnnnnnnnnnnnnnnnnnnnnnnnnnnnnnnnnnnnnnnnnnnnnnnnnnnnnnnnnnnnnnnnnnnnnnnnnnnnnnnnnnnnnnnnnnnnnnnnnnnnnnnnnnnnnnnnnnnnnnnnnnnnnnnnnnnnnnnnnnnnnnnnnnnnnnnnnnnnnnnnnnnnnnnnnnnnnnnnnnnnnnnnnnnnnnnnnnnnnnnnnnnnncccgccccgccaccccccgccgatctgggatcggttctcccccaggattggttggtcctcgggcgttgaatcgtgtctccgtctccctctcagacaccgcacctgactcgccttgggctggccctgtaggctccatggcgttctattatgactctgatgaggacttgcctttgcccgttgagtctgatcacgccgagagtgttggtccatctggctttgaaatgtgtctaattgcgggatcggctgctcaaagtcgtagataccgttgagggacaagttggtgccgacattcagtgagggtcgatctggaatacccgcttcttcttattacgtttccctaagttggtctgtgtcaatctcttgtcagactcttaattatgttagaatcaatctttcgggcatcagaaccatcaaaaatcataaaaataaatgataattccataccaaatgtatcttttcacataatctttttggatgttgctggcagacaaggaaaaaggaacgtatacaacgtagccctagtatgaaaacggtcgcatatatattccacgcaatgaacaaaacttgaaagttagttacctcaccacaattctttaataatatcatttactaatggttctctcgatccatgaccttccattgaatttccagacccagttccaaggcagttgagctaagatcttggtaccccaactgccatgaagtcatactctccactatgagttcagaatgttgtcacggccgaacacatcgaaaaccaaatgactataagtataactatcaaatactcctctttcaattactacacaaccaaaaagaaaaaagaaaccattctacattaaactacatttcacatttccctcctctcctaccaaaatcaaccaaaatggtccgcggcgcagaatacgacaacggtgtcccccagagcgacaaccctatcgagaacggtcccaacaaggcccacggaatcggcagtgaggtgagatgcgcaccaagtaactccaattgaactctactaacattccacagcccgcagacctgagccgctcccacaaggctgcccctttgccagagcagactggctccggccgtgaagtccaccctggattgcctaccgctggatcggcgcatccccaaggtggtgctgcacagcctgtttcccttgatgagaagaacactgctggaaaataagtgcggtgattttataatatgcggatggcgatgaccctgtatgagtatgatattggtgtttttgatattttgcatacaacatacgtattggataatgcctggagattgagacctttccctttccgtatcattgctcacctcttgccgcttgttgatcaagtaaactgagcacgtgactgctttctccatagtcttgcaattgaatagttatcacaaccacaattacaaatcaaacatagtaattaaaaaaacgaatgtcacacccatttcaagcatcttggccagcgggcattcccgaggttcgcctgtatccgaccgatttggactcggaagagcttgcggatgaggccaaggggtggttgctgttcgtacggctataagactgtacccttcttcaatgataaggttggtatcgacgatttatcttactttctgtaggaagaatcccaacccacgtcaacctccgcagatgcgctgcatcaccggcgagccttaatcgagagatgggccactgccagccagggattccgcgaggtccgtatagttataccctaatgttaatgccttttctaatttactctcttttccccctcctccgttttcttaaagtacttgagaatgaatagaaaaaaatacgaaaatacaaacgagcagtacagtcctactatcaacgtgccccaggttatgactcggctcccgactaccctccgtccaacatacggagtacggagtagttagttgtcaattcctctgttggcaaccaggctggtccgttgatatatttttccgctccgagacgaagttgctggtacttgagagcactggacccccagtcgaatctgtcaccgatgtctatcatacatacgtattctacatcctacacggcccattgtatgtttcaaatgcgaaggaattgcctgtcgcttcactggcttcggccttcaattagtccgatatgtttcgcggtgctttttggcccttgtcttccttgcacagcactagaagccttcgtactgcgcgatattttcatcaggtcacaacatatttcgttacccatgatgcgagagggaatttagttaccaggaaggtgcctattattattggcaatccgggggaaacttatgttctgattgaaacagggattggcagtgcactccgtgccgctagccccttacatttccttccgcggctagtgctgaagatagatgcaaacttacattttttcatgattcacaacactttgggtttggtaagttgtcagcgagaggtttatatagccgatgctaacagtttattaggaacatcgagttattcccgtctctatatcccaagccaactccctcgtcaaacagaatcaaatgaaagccctgcaactttgctcttagacggagtgatgcacgagatagttctagatgggacttttgatggtacatataatccagctacaaatacttcccgtcttacgcatgctcatctataatgcctatccagcaacttttgcggagaacgcaagcgctactgcacggaacctgaaaagcgtacttgacaacctgaaggatatgtaatgttaagcttgattttactatagccatgtcgggaatctttcgatataagaccgttgagacggattggcaacctatgactagaatcccgagagtaaatgagaaatcccaatgtcatcgagactatcgggtcagtatcatcatagatccttgaaattcacaactggatgtaatattttctaaatttgtctgcaaatatgcacaagtcaatccatgcacaacattatgattcagttatcaatgtccccatcaaggcaagcgtggcggacacaacgcggtcttgactagacaatgtacagtagataaagtgatacgaataatcactaaatcaacaacaaaggtttacatcatgatacacctctttccctcccctctagagcaagaaccaaaagaaaggctaagacggaggattaacgtgcaaaacaatatcaatttgtgactataaatcccacttgaagctcgcaaacaataggactggatactgtgagccgcctagacaccattcaaaacatcgatgatgtcgacggagagtaagaggctagtactcagtagctgagcttctatactccatgatgtctgcaatcaccggaccaagaggcgatgccacagacttgtaataagttcctaactgttcagcggtccactgattggtaacgacgcgatgtgagcattttctagccccttgttgtgtaggtcctccgcgaatggtaccttttgaaagtagtagcttggaagactgtcaagaatcgaagcgtttgtgtagccattccgaaagaaagcaggcgagagggaaatgagttgtatgttcaaatggagttgtgatttccaataagcaacctcactgataaacccttaaagacatcagcagaaaatacggtttgtaggagagatagtaatcgacttcaatgaaagagaagacgcaaatatttatagtcctctcagatgctacctatccaaggctgttgggttacaggaagactcgtcctggtgttctccgggagtattggattagaacgccgtatttcagcaagagagttaaacttacctaggtatgcgtaagcataatgtccacttcatcaagggcaggtgatacaattttgatgagatggggcaaatattagaatttcatgctaagtgaccttagatccatctcttgttttctcatgaacataccgaaagggcgccaccaaaatttcaaggcgcacgatactgtaggccgatgagaaaaagcctagacctactgcatccgctaaactaggaaataagctgcccaggtccaaggactgtatctgactctaagctacgtcgcaattttgagacacattgatctgtgtctggtcttagtttggaacatctatccttgacccacctctaagggaatctaagcatacaaactcaaagacccacaactcagacctcctatcgactccactttacgatatagaacactaaaatgcggggattcgcctagatcttatactatgtatatcgatactatcgataaagacctaaaagaaagcttaacaaaatattctattcctcgttagaatggatctcctagtagccctaaagattatcgttgcgagtcagcctagtgagtgcggttccagggctttgtcctgtaatgaaattgttaggactagctactagcaaaacgtccgtttgcttgcttccaagagcttatcttctgtttactatgtacggtcgccttagaagtcactttaaaagagaatgtgtttcaagctatgcagtcggttttccactgtgatgccaactcaaagtctctcagaggacggattcgtggtgcaaaatgggcaaaccgggccatttatcttttatcacgcactaactggggttctcgtagctgggacatcatctatattggtatgaaacatatttcaagttttcttggataagctaacttctggtatcggcagctagtaatcaagtcaacttttataacgagttcaacgactattcgatccttacattttttacaataaataggtatagaactagaaatattgtcgttgggatatgtctctttgattgtcacgctcattttagtgaggagatcgatatggagtgtaacttcaacttgactaaaccatcgcttactacacctgataaatctagagaacccctaaaatggctgtgttaggatattagagatcacccatccccgtgatctacttcctagtaaggcttacatagatagatgcttcgcttctcatatagaacttggagaaggacgagggctatcccagtagtcaattaggaacattccaatgcttcctgaatcagatatggcgttcctatacaattatcaagcatatcatcctctaagtacgagttgtagattaataacccagcctcgccattaggcaccttatttgaccagaccaaccccctaagggaatattttgtggaggcttgtactcgacagttgcgagaatggtgctggttctatcactaacgcgatggattgccacgagggatggctcacaattgcttttatattggagattttgaggtcaagtcactctctatgagacacgacaaagagcctctgaccgcaacataacaaaaaagatgaagctctccttttccctacgcccgatgaacatgacgtattagcttgatgaaatggggggggggggggggttagaaaaggggggggcggnnnnnnnnnnnnnnnnnnnnnnnnnnnnnnnnnnnnnnnnnnnnnnnnnnnnnnnnnnnnnnnnnnnnnnnnnnnnnnnnnnnnnnnnnnnnnnnnnnnnnnnnnnnnnnnngtgtgggggggggggggggggggggggggggggttagaaaatgagggcgcgatgcttgaggccggtctgagtaatcagagagcgtccaatgagcatctacatagaatcagtgttcatacacgtgactggtctgagctcatctcattaaagcggcagcccagataggaaagccccacacataccgccgtgaatcaatgatgttattcggaggatcaacgacaatatgcgcattctataaatgcgcaggaagtggtggttaaaccctttgattaaagctaagccttaggaagtgataaaaggtaaaatataatccaccttgcctagaggcacgccttccttgcgcaagatgccataggcagtagttacatgaaagaagatattagcctgcataatgcacgcgaatgcaatcccagacaagagttgtgtattacctcccagaggcgtggggctgacggtctcgcaatgttcgaggatgaagtctttgtcaaccgtgtcgagggcctggtgcgccttgtcgatgcgagcgtacatttccgcaaatgtgtagaccacgtcctgactcgtgtcatccgttgggaatggttcggctgtcagcttagccagagcgagccgtgtttgcatggttgctgcgaacacttggtagctaagtgatttcatgtcattgtggagtcgacaggacggaagattggaagcgttgggcgcctcctcggctttgtgaagaatatgcgaaagtgcagttaaagctcgcttggtctggagaacaaagccctcgtaaattgtgtacaccattttggctatcggacttgggggagtgaatatgaagtttgtgtgtagaaatatttttcatctgagacctggggaggcaggttggttatgtagcgtacgatcgtccccaagaacgtgagatgcgcagtgccttgggtagcactaactagttagttatgtgatacgtaccacgtaagcactagtgcgtgtagcattgatctaggttcacggggggcctcgattgagtccagtgatcgagatcgggtgccgtctctacgccaggcaaggatgaaacatgaaaaggatctatataggaaccgaaaatgatactgatttcctggaggtctgtatccggttggttgcccttgaatcttgagtagtgaatgtgaatactcttttgccgaagtactgagagcccgtaggtccgtgcatgtcataataccctcgtatccaaggtctcagataagaaattatttcatagccctcggacgagaccgcatgaatgtgttatcctccttctctccttatccgcaaggagagtgaagtaaggcacacgtctaatgcgtaatactacatatactagaatgagaatcacggctcttattcatatccacaaacgctgggatagctctataaatgtggtggacagatatgtggtagcagcaaatgacaagtgtacggctcggtaatgcgtgcgcagggaataacggaacatgcagaaaaaaaattatatgtttaagagtaaatatggaatgagaatggaaattaggacttcgtagaatcagagcgatcgtcccgatcttggaacttctcactcgccttctcggacttattggcttcgttggtaatggtaatggtcttggctcgcacaacctcgaggagcttgtcgccaacctcgctggcgccctcgattttgctcagtttggttcggaaatgctcgacatcggcttgcattctgtgtgttgttagtatcaaccatgagccgaattcgagtactgaaactaacctcttttttcctgcctccgtatgcacgtcggcctcctggaaggccttcgtccattgatcacggtagctgttgaatacgggcaccatgatcatgctaactgtcatgtctggaagatgcttgctcaagacacggtgtagagtgcccgtctccttggccaatgtttccatgtaaggattgacagcaggagctgctcccttggaattccagtcgatcttcttcatcgcgttcacgtggaccgaagaccgagagctcataatatccaccagcttctcgtggatgccgctctgatgctcctggcatagtcgtttgactttgtcaaactcggccattaatggatttgtctgtccatgccgacggacaaattcccgtacatacgggactaaagcaataacaaagctcaacgcttgtgacgacaacgcgagatgcttagttgtgatgttcttcaggcctgcactacgcgtagcgccggccccaagaatcaactgcgatgaccgcgagttgaacagtttcaagatatctagtagatgcggcgcaatatcctggatcatgctaggaatatttgacatgaggaactcgaactcctcaatgctacgcatcatggcaacagcggagtcaggtagaatgtatttttgctcgtcgatgacggcactgcgaaccttggacttgtctgtcccattttcagcggcagtaccagcaattttgccttgctcatttgtaggatggggaatccagattttggagacctcaacccaggcctcgatgtctttggtgctggcatcgaggatcctagtaagaatgacgttttcggcatctccaaaatcgcgtgcatcccatcgatcggcatccatgacattgacaatttgatggcgctgaccatcaccgaaacgggtaatgaaatcgcggatttgatttccgacaatggtctttagagcagtaccactgcgtcccgagatggcctcacattcatcggcgaacaagcggttgagagtgaagtacctgaggaattgctccttggaaagctgggcggtctgttcagatcgtaccttcaatacctttattatctgagattgggcgatgtcaacggcctgaccaagcagactagacatatccaaaacctgtagaatctcatcctgggccatgtccgaggctgtcggccccatgtgtggtgattttatagcttgatcgatactttgcgggatggggcttcgtggtggtgacttgacgccggaagtgggcgaattccccaagccgctagcgatatctagaaggactttgacttggacgctgagtcgcctaagcgattcgctaatcccggtgtagatattaatcaacattgtataagcatcatccgagtcgagagcacgcagattacgagcaagaattgatgatttctcctgctggcttagctgatgaccgccatgtgttgatagcgataccatagattcattatcatcatcactagaactgggcaggtgcttgcgaatgaggcccttcatttctcttaaaacagcagttttgaaagaagttgctgctggcatcgtatagcgggcacgtgcgagtccgttgagctgggtgttcaattgtgatcgcaactcgctattgaaatccatataggcaggcgataccgatactccagaccgttgaccacctcgctgccgttgaaatgagtttccccagcgctgcaatgtcacattcgatggcactgtttgaacatgctgtcgtaaatctcccaaaaggtcattcaagaaccgggtctcatagcccatgccaatacgttgacggagctgtgccaggtcgtcagatgctccctcaagggccttgatacctcgcagatcaagaaggcgcctgggggcaccctccttgtcttctaaagtggcgcgatcggagagcttttcaccggccatcagcttttcgacttcctcgagtccctcggcagcttcctcaatgtcaccctgctctaccaatccttcgcaccgggagacagattcaaccacgtcccgaagctgagccacagcagctgccaacattcgtacattttctcttcgccgtctcaaattgacaattttgagaccgccaagagccatttctttatcgattttctgaaggtctcttctgagtacttggatccggttgaccgagtcggcggcttccgcgtgcaattctcggagagatcctagggcagtgaagaaggatttcgaggccgttgagatagacgaaataagatggatctccacggtatccatataccatgaaagcttttcttgtagaatagcattcgttgccagtgcttttcttccggtttgtactggctccgcaaccaatccattggcctgttcatcgtctttggtgggcggtctcggcggccgaaccacatctgatttctctgatatcacatcgaacgtacggggattttccagatggaagtcctcttcgaaataaacgggaggtatagtggagagaggagttaccgcgggggcacgtccacggccagtggaggggcgtcggccgcgagtatcataaggcgaagatgatcttgaagtagtcgagatgactgaagacctccgctcgagagaccatggcattaatgaatcgcgatcagaatctggcctgggagatttagcagcctgcgccggtagtgtatcctctcccgcgccttctttcggtcgttgaaatacatcgtacaaagtgcccacttgcgatagatatggctggaagacctttggatccacgtgcttaatgttggtcaaagtcacaggcgggatatcacgagaggatggaggcctgaagctggcggaggatgtggcgctactggtcgtcagaccggtgcggatgatcgggggctggaggagtgttgaaatggctacatgggcgttaacacgtcaatcatcgagcaattgaggattcccaaggtcacaaaccattctgcccagactctgcgacagactctgagattgagccatggtagtgagaagagtctaggacacctcctatgctcacgatcgagctcgcggttgatcccctcctcagggggaatcgctgaggagccacacgtggtgatccaagctgacttgttgaataagaaatcgaaggcgacgagaccccagaagccaagctatcaattgattttcgtggactggttgacgacatggctgtcacagccggatcggacagccgatcgttgagatgttctgtgttatctgatcatgacagtggataaactcctgactatagagcgctggcaggctcaggtacagggttcaatattgatcgagtcagcttctgcgattcgcaattttggtgcaagatcacttgggtcctgtgtgcagaatgactgatgtggctttgtttccatcaagctggtaatctccccaatcggccaatgcgctaacgccgggcccgcggttccccgtgctgactcagacagcacctgcctcaggcaccagctgactcagaaaccacttaacgcgtgaaccctcgacgcgtcgcgttggttccacactaaccaaaagttcttgaagcctcccttccgccaaatcatcaacccccaacttgcaatatttgcggtcctctacactatggatagacgcaccccctatactttgagcgtccttgcgcccagcacaaatggtgctgatgaagatcgcaccactattcaaaaccgccttcgggatttcgtgctagaatttcaactggataatgcattcgtctaccggtacgcatcccacttccttgagattccaatgtaggctaatttattattcaacagtgaccaattacggcaaaatgcacttgtgaaacaattttactgtgatattgatattgcccatctgatttcctacaacgaagaattggcccacaaactcaccaccgagcccggcgatatcattcctcttgtaagtttcttatcccgccaatcttggccctcgctgactcgaagtagttcgagctggctctgaagcaatgtactgcacggattgtctaccctgggcagcgagatatcatactaccctcccaccaactgctcttacactcctcggcatcgcacatctcaatccgtgatctcaatgccaccaacatctcccacctcgttcgcatccccggaatcgtcattggagcttcaacaatatcttccaaatcaacaatcattcacgttcgttgcaaaggctgcgactacagcgagaacatccaggtcgatggtggcttctctggcctcacgctgccgcgccgctgcggtcgacccagggacgacaacgatcaacccaacgagcaatgtcccttggacccttacgtcgttcaacacgaaaaatgtcaattcgtggaccagcaagtcctcaagcttcaagaagcccccgaccaggtgccagtgggtgagatgccgcgacacgttcttatttcggccgatcgctaccttgccaaccgagtggttcctggctcccgttgcacagtaatgggtatcttctctatctaccaagcgaagggtgttaagaaggaggctgcagtggcgatccgcaacccctatctccgcgcagtgggaattacctcggacttcgaccagacagcaaagggaaactcagtcttctctgaagaagaagaacaagaatttttggaactcagccggagacctgacttgtacgatgcacttgctcgaagcattgccccgtctatctatggaaacgtggatatgaagaaggccatcgtgtgtctgctcatgggtggctcaaagaagattcttcctgatggaatgaagcttcgcggtgatattaacgtgcttatgctgggtgatccaggtactgccaagtctcagcttttgaagttcgttgaaaaggctgctcctatcgccatctatacctctggaaaaggttcatctgccgccggtttgacagcctccgtgcagcgagatcataacactcgcgagttttaccttgaaggtggtgctatggtgcttgctgatggtggtgttgtgtgtattgatgagtttgataagatgcgtgacgaagaccgagtcgccattcacgaagctatggaacaacagaccatctctatcgccaaggccggaattaccacaatccttaactcgagaacgtccgtactagccgctgctaaccctgtcttcggtcgatatgatgatctcaaaacccctggcgagaacatcgatttccaaaccacaatcttgtcccgtttcgatatgattttcatcgtccgtgacgaacacgagcgtggccgggacgagaagattgctcgccacgtcatgggtgtgcacatgggtggtcgtggtctagaggagcaggtggaagccgaggttcccgtcgagcagatgaagcgctacatcagctactgtcgcaggcaagttgacactcattactgattccaactgctatattcatactaacatcctgtccagtcgttgtgcgccccgtctctccccggaagcagctgaaaagctctcgtcccacttcgtctctatccgaaagcaagtccaccgcgctgagattgaatccaacactcgatcatcgatccccatcaccatccgtcaacttgaggccattgtgcgtatttccgagtccctggccaaactttctctctctcctatcgccacggaagcccacgtggacgaggctatccgtctgttcctggcatccactatggacgccattacccagggtgagggccaaggtagcaaggaactcatggagcagagcagcaagattgaagacgagctgaagcgtcgcctccccattggttggagcacaagcttggctaccttgcgccgtgactttgttgatggcaagaactataccgaacaggcacttaatcgtgcactggtggtcttgcagcgacgtgacaccatccagatccgttctggtggatctcaaatctaccgtaacggagtttaatctgtgacttattatgattctaatgtgttctgttgatacacctgatatgtgttatgggatgggttgtcgattctgcgcatctgtcgatcttgtaaggcatgggagcttgccagtggtgttgggcgtgttttatattgggatttgacgggattctcaagaacaattgcatatttatttctaattcttccaagaatactgtataaaacgtggtatcttccctatcgtgtgtcttagcttcccttttagacaaaacccgtcactaacgccagttccctcatcgccttgaaccactgggaacgaatgaacatcgtatgaagcattgttcacgatatatgcacaggaccaaggagagtacttttgtgattattatcatgtcacttggcatcggtacggtttcccctttcaatcaccaacaacaattcattgaattcaaaaaatcactacacatatctgcagttttccccaattatctcttcatccagtctttctaaatgagtgcatgtaagccctacgacgattatgcctgggcaataagctcccagatctggggcgactggccaaaacttcttcgcactgatggggacttctacaatgacattggagccattctttgtgaagaatttagcgatcttaaatgtgccctgttcgatttcctcaacacaggcggtttcagtacctgcttcaagatggattcaccaatgattccggcgctatcatgtttcctgaagaaaaagtccggaatgaagtctccatcatgcaatttctctcagaaaaaacttcagacaaaatcccaatcccggtgccttctatctttcgctggacaaagacaaaagagagtcccttagaactgggtccttttatcatcatgaactatatcccccacgagggaagtatgggtgatcttcttgagacgccaggacgccaaccaggacaacgtccagtacttaatccggagctcaatccgatgagactataagcgctatatggaaaactagccaacatcattctctcgctgtctacactttcttttggccggataggatccctttacaagaatgccgattctacgtgggaagtgttacatcggcctctgtcttactctatgaacgaaattgtgcaattggggacgttaccccgatcgaagctaccgatcaccacgtacgataaggcgtcatcgtactttgaagccctcgctgagctccatatttcacacctcagaagccaaaggaacgaagcggatatcgaagaggacgtcacgacggatgtcttggcggatgaatttcggcgcaaattcgtggctaggtttctcttccgcaaaattgctcgagatcaggagcagaaaaagcaatggatattacatgatgatggcccatttcctgtttggtatgacgactttcgaccagaaaatgttctagttgatgaagcggaaagcatcgtcggagtggtggattgggagtttacatataccgccccagccgaatttactcatgcgccaccctggtggcttcttctcaaaaagccagaagattggcttgaaggccttgatgagtggtccatggaatatgagaaaccgcttcagatctttcttgaggcaatgcggaaagccgaagacgaggcaatccaaaacaaatgactactagaaggccagcggctatctagtcggatgcgtgacaattggcagagcggagacttttggatcatgtacgccgcaaggaataattttgctttggacacgatatattggcaaaagatcgatcagcgattcttcggaagcacatgtgaatacgagaatatctgcgatgtatggcggaagagactccatctcttagaaccagaagagatagagctcatggaagaatatgtggatctgaaggtcaaagagagggacataattttcgcttgggacccggatgagtacaccgtggaatggatcaagaggatgagggcgatgagaaagacgaaggatatgaagcagaagatggagagagtggtgaaggagtgggaggaggagctagatagaatgacaaagatggagagcaagggggagataaagaggatggagatggggtggaaggaggtgataaaagacatgaaggagatgaagaggaggacggccgcggagtgggaggaggagatagagaggatgatgaagatggagaagaaggaggaaatcgaatagcttctttagacctgtcggaaacctccttcacatcctcttcttcttcttccatgtagtgaatttagttcccttaaaaatcatattttcttccaggtgaatgcaggaaagagattagaataatgctatggtgaagcgaggtgatttatgtccggactgcattcattccaaagttactatccgatctagacgtgctgcttgtctgtattcgagagggaccgaggtcttagtaggatatcatatagggtagatggacatacacataccaatagcgtaggaacagtcctaaatagttgccagctatttgagccttaatgccatctgtgtgataactccgccttctcgtcccgtcaacatatcgattccatttcttgactagaccgcgctagcctagaacctggccactcttcatagggtaagaatcgaaatcaaatggagcgagctccatcggcccttcgagagctatgcaatctgatctgatgaagcggatacaatgaatggacgtggtgtagccacgtcggtaagtctgtttcggcactcgaactacaaccagtgggacaaatgctaattcaatccacaatatggagtatgtttcacactgatattgcctacaaacctgatgaatacttatatagaagctcattcatacccgagacatatatatccaactcgaaggatctcaacggacttggagagtcatcaactcatttggaccgctgcagctacttcaaacatcaatgccattaccactgctgatttggtacaatgtcttatcgaacggaagtttgagctgtttgacatcgacggtagcccagccgaacggcttggctattggatctcgatcagggccggaaccaaaacctcgagggcctggttgctaatcgcttcacccacaacatacctataataccttacctcctctttttgaccaacctcatcgacaccaagaataacttctgcgtcaagccaggttactctggatgcgatttgccgaactgtccaacatgccgcgcacgtgatgttggaatgactaatattcggtaaaaggggttttaaccaaatgttaggcatttcagcagccgatttacccctcaactagcgagtgtattccgtatgtacggaatagcacggtgaacctctattttttggcttttctctcccggaataggagacaaaaatttgggatgatgcgttgtcaatcttgacatgatccacctcagcccctccaaaccctccaaaccctcccaagtcacagggctagccttatccagccacaggtcccctatacgccacttgtgaataaccccttcgcaatgtcgactgccaagaactgacaacatgaggctgcatccccaaattgacttggctctgttcagctccacattgtccctattaggcaccagcgtttctcctcggtctattcgaccttcattggccatgtgtggcccacgtactgtggctgtcattaaggctgtcacgggatcttgcatccttggcgcgcatgcacagtgcaacatcaggacatgtcgctcgatcctgtggctggggaccgtcggaggtgtcgccatgcgccacgataactgcacatcaagctgatttgctctgtcctcttttgaaccggagaccccgccaagatgacagcttggaatgtttacagtgctgatccacccactgacgtggacgggcggtgtagatggtcccgttctgtcctatccacagctgtccaccctggaaacactaactcgctaggtttctttgtcctaaaaagcctccccgcttactccgtatacggagtacaatctccccgctttgccaatgccggtcgtcccaatgaatgctccactcgggccagctgccatggcgcaattgaggcagtgcgacgaatgagtccaggacaagtgtcggacaggaactgggggctgctgcatgattccttgtgtaagcccgtatcgcaattcggggtgtattgacctcgccgtatggggtatataaggacagtccccttccctgaccacttctgccatccagaagtttatgatacatagtctcttacactctactctacattattctctcccaaatcgacactatgagcttccacgaatctgcttcccacatcgagcttgtggatggccacatcctcagggctcttcttcgcactgagaatggtgatgaggaggagtccactatcgatctcgatcaccacattggaaacgacaatggtatgttgctctgtctttgtcttgcagtgcccctctacacgaccatagcaccagttagtctgactcgtttatttaggacacttccactgggatggcggtgacttccacgccagtgccgaaaatgtcagattcgaccgcgaaggagaatatggcgtccctgtcctccgggctgtattgcgcgacgtcgatggcgagggacacgatgcggatatcaacctgtccgagcgcattgggaatgataatggacgcttggtcttcaactagtgggcttagacagctctgagctctagggactagcctcatcattattgctattgtctggtacaattagatacaatatacatggcagatctctaataacttcctactgttgttgctggtatcacgatttacgttaaatttttgctttactccattatgtctcttcgcatacaatctgtcatatatatcaacgatttagtctaatactctggttcatttacttatgtggttagttggagccgataaatgtcttttgagtcgtttcggatgacttttacatggtttgtccaatatccataaaaaggaaattgttatgtttctaagtttctttctttatttcagatattttcctccatatcgcaattcactcgctccttcccttttgcccaccttccttcactgcctcatatgctcatcttcctctcccattatgtgtctgatgaaaatgccattttcaacgtttgtcccctgcttgatgattgacttgcgattctgactttagctcctgactcttctttatcgcaccatcgtccataacccatcgagtgaggcaaatattccctaaattatcgaagcctcgtcttgcctcccctggaatcgtaacgctatctcgccctcctcaatccagccagcccatccatatacaaggtcaacagacagaggaccagctctgttatttggaaggcgaagatatagacattactaggatttccgaaccaagccgacatcacccctcaatatggctgtgaagccaaaaggctaggactataccccagtcggcctgccatgtccgcagtcatataggtaagtacctgatggtataattgttatggtgtagtagcaagttaacccattaaaaggctcagcgaggatggctgtactgtctatgggcttccggaagacgcttgaaatcctttaagttcccaaatgtcacccacaaccacataaccgtgtccagatgggcttattgaacctcgctctaacattttggtctctacacagaagctgctcagaccgagatgaagagaaaagacttggcggccaagttcaagcacagcaataagataaaccttgtcgactacagttggcaatattattattattgttgagacaggcgtgtcagatccgctaagttaactacggcaagatgcagaaaagtgatttgcagactattgctgccatgctaggattgccataatattgattatgaagggcctacgtacacgaaggacctagcagttatggacgctagtgctggcatgaaagtcatcggagaggcagatacgccgtggtcccaggatgggatcacttccagaggcaaacaatgggagtgatgctttttggggctgaacatgagggcagaattggctggatcctgggtgttggccaggttattcgcgttgggaaattgcaatgaagtctatccattctaaataccaagaaccaacccggtgccgtgcacgaaattgtactccacaataagagtatccccggaaatatacgaaaaagtcttggctagtgacgttcatcggtgcgtaaggccgttgcatgtaaaatgccgagctagctcggatgtgggtggactacctccaccatacaatgctcaccaccgagtcaatagaaatacggctttcgaataaatgttgaaataattcgttgaaatctaaccgtaatttgacaattggaatgctgaatccaatcactggaaagcggaagaggctgtttcccgtgatgcagacaaatgggaaaccactcgctaacgtataagcattgccatctgccaataagagatagtgaatgaaggagattcataaactcggagagaaaatggggtctctctgctagccatatagggcgttgttatggagttgagaattaaggtttaactgtaatcaaataaagctattgcaagggtaagtgtcaaaataaggtccataaagtatgtcggtagagtgcagatccacgtgcgtcccgcatttgtgggtccacggtacggaagtaaaccttcgaagggaccgcttgaaataccgtcttaattacatcatatctttcatccttcatcttttatccttcatccatcatccgttgcaaaataaatatctattgtatgtttcccctcccttcatcactttcgacctaggcacttaatacggaggacattgggtttttcgacgacttctctggcactgtggtcacctttcagacgaatcaaaacaccccttggacccaaacatgggtcatcgaagaacaactatcagagcgttttcaccgtgttgacgaagtggatgtggcccgcaaactcgggccatcgtgagctacgatagagttcgaatgctaccgcgagaatgacctcaagaaaggcgtaatgcgtatctaccttcaagtcccaaacttgaaaacggacttccgaacccctcatcgccgcgcagaacaggcgattgcatcaccaacgcatttagagattgagtcactcaaaaaacttcagcttatgggctctaccgtagcaccgaaactcctcgccgtgcaccaagataaacaaagtgacaccggttctgtgccaggggggtatatcaattaccttgtgtaggagaaggttcccggggagagcttcgacatcaactggttctgggggctctcagataagtcgcgtgctgatattcgtttgaagttcaaggcgctctatcggtaaatatccatacttccacactgatgaaacatttagctaacccatgacggaagtgaggttctagcgtttggcattcaaattttccccccagtgccatcgaaaatcatctatgactttgagactggtaccatgtatttttaccttttcatatttgtctatgttatatgatttatacttagcaacacattctaacctgattctatttaggcaccttcggggtcttgtaatggccacagagaagggagatccgctgcaatgggatgacatattatatgactagtttcatctgttaaatgctcccaatctgaaaagttaccagggaggtcctgactgggtttggtagaggaggatgtttcattgccgtgactactgagccatcaatctaagtgatgtgatcataaacaaagaaaacatatttctattgacttcttttctgccgactagtagtagtaatacgatttcctatatagtcacaacccagtcatcatcagggtgttgttgataggttcgtcaggtcctgactcagacgcacgacatgccatgtgaaaaaagcattgtttgacactaataatggtgcctgggttgaattctgtcttggcctccttgatttgcgaatattcagccatccatacaccatcgaccagttgttgacgcaaaaagattgtctgccagtaattggtcatgaagccgtagttgcaactgaggtcgtgcatgtgcatcaaaggttgtgccagtaaatacctgaggcggttgccggtggcgtcggagaggtagggcctgaagtcatgagtaggtacccatgatacctttagctcccccaccatcctcacagttgtttgattgtccaaggaaatgacatcaggggtatgcctgtacataattccagcacattgaaaatcagcgaaagtcatttcaatgccttgagcctgaagcactgctccaacggcatgtccaactgattggaaaaaccggcctcgaactccatcttcatttcctgtgagtacaatttctgggactggatctgtgatgcccttccgggtgtaggccacagaactccattgttgagtggaatatgtggccacaacatccgtttcgaagttatcccgttcctgtatgctaccaacaaacctgaggctgtggatggtgtttgttatgcttgcaaatgggctttgtgaagcggcgggagaggtctgagaaggaggtgtctggcctcaactttacgagccatattcagcaaacctgtaataatcagctgcaatcagttgaatcagggtggggattagactcacagtctagtgttccgtggatagcaaagcccaccgagtgtgatgcagctgaggtacaagggtgccttataacaaagcttgatgaggcggtaataggagagcacagaaagtaaaatggtaccagaggtccctagtgataaagtagatgtggagtgtgtcccgaatatcgcggctgatgatcaggcttatttcgaaccatgaatgtgtgatgactttcgctgattttcaatgtgctggaattatgtattgtaccagttacttattgcccgtagagaattattaagacgtacacgtcgaaacttggccttctgccaggccaggctcagggaaggtattcaattattgaaaggaccatggccttatccggctatagtgcctagggcttcgacataatagggtggaaactggcaagcgggcgggttagaggaatcccatctcctgttccgttagcgtgggatctagagattcatgatgaggaacactatttggtaggttcagccgtagcctgagtgggaggttccataagagcttcagtagcggctcgtaccaggtctggaagtattctcggcagctccaatgtcaggctggtcaggaagttcgatgacaagctcattgggagattcaaagagtgctcatacccaaacggggactccaagatatatcatgttacttgacaaccatctcaattttatttcaataagcgtagtaaatttgatgaaagtgggagtaaataaagaccatatagctttagccaggtatctgttaagtttaaccaaaaggtaagattttccaatgaagaccccttataggttagtggttaattcgttggaattagctgctacgagctatggttgatcatgtcgtgattgggaggtcagttggatgggttaaatgccttggttcgatcctaggagtagtgaacttgtctaggggtgattcattttttttcgctccttacatctatcttataatattccaccagtaagcgttgaaattttgattactaccactctcaagacagctcttcaaaaagtctcctatattagtcgaatgccctgatgctatgatagattgctgtcatatgctatagattgtttgctagatagctaagcgggaagggttgaggtttgcaccgtttgcgaagggtcagctatatcaaccggctgcttctcacttcccacttgcatcttctttctttcctcatcttcgttattgagttaatgtactctttttgctttatgatcgatctggcgcctcacagtaagtacatatctgaatgacccctttggggcggacactgaaggctaaccaataagtggcagcagtcaatcaaagccccgtccgaaattgatacaccctcgacgagaatttccagagttccaacaaaatacaacgacggttgaaaatttaaatacattgattcgccggtaacaacaaagttggttagatccagcgtggaactagccagtgaagttcatgggattcatctaccgagatccaatgaatatggcatgtagcatctacagatttccagtgcccgcaaatgcttgcaaattagttggaattggtggctcgatgcgaacaaagtctggggcagcgactgtagtatgcaagagaataaaaaatatttcaagcaccaccacacaatgggttaaacaaggaacttcttacccagatcgtggaacgatcaaacttttcgctgtttcctatgacttacagacagcttgtgaggcgatcgacaaggaacatcccaatgttccaggaaatggccctatggatgatgctcgttcggcgaccatgccagtgccactcaatatacagtgtctcaccgcaggtaccatagtccaatttgattacatctctacgtccataccaatactgcatcttttccaggatgaccctggcaatgtcgccaccgacctcggacgtggaagagtcaatcaccggccgatagagtggctaaaaggccatgtatgagctttgcatgagaacgaagacctcatggccaatcatagaatatgtgacgggcatgcctacacagcccgctccatacattcctggtcgagctcttttttcccacctggcccatctatgctcccagtcataaacgaaatcgccatccaacaggctatgagcgaatgtcacgcaaggcctccaaagtactagttcccagccacacacaatgacgaaggaggtgttcgtcttttctgataacgctgatgtgcttaatcgcactagaggcgatcttgcatatgaactggagagcgatgtggcaatcaattggagataattgctcggcactcggagaaattgcataggctgggtgtttctatcgagctgcacttgagcccaggcaattccggtatgccaggcaatgaagtcgccaataaaatggcaaaaaaagccatgtacgagctttgcatgagaacggagacctcttggccaaccatagaatctgcgacgggtatgcctacgcaacctgtcccgtttattcctcgtcaagtccctctctcttcttcgctttttacccgcaatacaagtaataagccatcaccaattatttggaactgggcaattaatatgttgaatagtaggagacaatcctccatttagatttgtatgttgtcaagatagacgtgggtatacatcgtagatcggatccacgggactgtgcctgtcggccccacatattccacatccgatgtgccccgctcggacgtcactccaattctttttccactccaagccttgtctctctcaattacctgaccgaaaacttctcaattgtcgctcctctcctgcgttgcgcatctgaaattctgacatctacaaggtttccatcaccctcagttactcccgtccaccgcttttcgcatcttcccagcgcaacccaaagacacaaccagcctccgacatacaatccaagaaccccttctccgccatggcacccctgatccgagtcattggatcactcaatgtggatatggtctcagtcacaccccggttcccaaacccaggcgagacaatcacttcctcatcctacttcaccagcgcgggcggcaagggtgcaaaccaagcagtggcatgcgggcgtatgtcccgatctaagccaacaggcaccgccaactccaccagcgatgtcaaagttgaaatgattggcgcagtcggcgcgctagatgcccacttctccgctctgctcaagccgaccctcgagagatccggagtcgacccgtcccgagtgaaagtcatcgagaacgcatacacgggtgtggcggtgatcattgtggactcgtcagctggcggggagaaccgcattctcttctcgcctggtgcaaattacgatggcatgcagcctaccccggaagtgctgggtatggcgctagcggcgcccgtacccgatgttatcgttatgcagggcgagatcccggtcgaaacggttattgggatactacgcgagatcgcagcttacaaggccaaggctcgcgctgctgggaaacgcggcattgagtccggtccggatgttatgcttaacccggcacctgcgccgcctggtggcttgcctgaggatgtatatgctgctgtcgaccatttgatcctgaacgagacggaggctgagctgatgactccccctgcggaacaactgcttcgcacggttccggacgcagagggcttggatggcaaggagaaggtcgctcgatatttccacaaattgggtgtcacttacatacttatcacgttcggcgagaagggcctttggtacagttcggccgatgccggctcctctggacctagtgatggagtgaaacgcttcactaatgatattccagccgcctctgtctctcatgtcttgaatactactggagcgggtgatacatttgttggggcctacgcggtcagggtggcgcggtggcgtgagcagcgtcgcgcggatggcaaggctgggcaggatcttgccgatgacgagaaggcataccggtataagactgtcatggacgaagcgatgcatgtggctgcgcgcgcctcggctcgggctgtggaacgtcagggtgccatggatagtattccttttgagaacgaggtctaagctaattggtacgggaagtctgtggtaatgtgcatcaatatatcacgagagactacagactatgtatatagactattccggtcggcatttactgcctgtagtagaatgccgacgccatcgtacgtcgatcgaacaaaggataggctcttggttttcgcgagtaatgcaacaaggatcagtacgccgaggaaataatccgagcccatgagggacagggggcgcatgtgccatcagaccttgcgaaccctgtccctgtccatgtaatatccctattaataataaccctccatcattctacgccttggacagccttcaagggcaaattcctactttgaaccacctggatagccagtccagagaacattccccagccttgagtgcacacccagacacctccaaccctcactctgagacggaactccgtaaaatgtttcacaccgtggaaattcacctccaacatccggcagcccccgatcggcctatgcatgcatgatttcatccggtaatctgagtccgaatgggggatagataaccaatggaaacaggatgcgttggcagtttcattggacatttcatgcaatttactattagcggaattgtagactctagttatcacgaatgagcggacaatacgcaaggaagagacttgaacgcgaagtcgcgcgcgaatgaacgtgcaagacgtggagaacgtgagggacgtgaaggtatttggtacttacgcggtgtatgcgctagtgccaggatgaccgagtaccgggtacttcggccgcatgaccgacgcgtccaagggatacgcgactatgcagtgctcagcgggggggaattgaccttttggtctttgctccgatgatttcggtaatgatttacggaggacttgtacaggcaattataggggaatgaggaattcattgacaatggcacagtgatatgaataccagttagatcatacgaacagcgcgtagtgatctgcatagtaccattgttcccacacgagacacgagacaagacatccaagaatgaagtcaattggattgtgctgggagctgggaatcggcataaacgccactttttcgaattggcagcctccacaacgtgaacgcgacgcgctttgccggcgtatgcaggccttgaaatagttcccttcgccctccatttgtgactcctcatgttctttattattgctccttgcctctaaccctctgatttcaagctcttaacgcccttaacgtctgaaactattatatctatctcatcgctgcacgtcttttaccccgaatcatccctcgttctctctcttaacggtgtagtcgaccatatcctacccatttcattatccaacctatatccgaccagttccgatcattgaatcattctattgcttttgaatcttttgtcttacccaattgccctctttctcttcggatcgtgcgatcggcctgcctagtgcctatttcagaccgccaatctcccccacttggtgctgaccaaaacaaaacatcccccttcttccttcaccatggccactctcactatgactcctactcgtcagcctttgggctgtttggacacgatgccgttgatgcgatcgaaactaaatcgtcagaaccagcaaaatggtacgtgacgacctatgttttgatgttccgaagacggcttagctcacaatcccaaccaggtgctatgtctatgaagtcaaccccaatgaagagctcgatcttcatcgacgccgattccgagaatatcaatccagcaagcttctccgccaaacggaagcgtacttctgaggacgacgaggagaacagcgcgtcgaagcccatcaaaacatcccgcatggctctttccacccgcataaacatctccccccgtctctcaaccccctcaaagctctctattacaactcccaaatcagctcctattctcaagccggctggtcgctctccaccacccaagtcgagcaagtccgccactcgccgttcgctcatcgccaaaccccgctcagagcaatatagcaagcgcggcgtggctcgtcccttctctcttgcttctgtcctcgctcaatccaaaacttccaagcctgtgcctgcccccaaggccccggcctcatggtgcttcgatatccacgtcgacaccgagcaggaagaaatgaccaacctgatgcatcactcgaccactgtccttgatatcagcgacgacgagggcaagtccgacacttgcccccgtggaaaggagaatattcctcctcacgagctgggcattgaagtccctgtcgctcgtgagtccactgccactactcctgccgtcgctcgcaagttgaagatggatgagccgcgtgctgcgctcggtgagctcgatgctgccgaatactatgccgagggctgcaatgctttgtcgtatacgattgtctatgatgatgaagagcacgcgcctgagttcaagaagccctcgttgcctctttcccggagccaaaagaccgttatcactacctccattgcttctgttttggacgttgtcgctgccgaaaccgagcgccgaaaccttcaggactcaactgacagcaccaagtctgctctttaatctaacttctcgtcattccttgcgtctgcatctgcatctcacggcgctgttctttggccagggtttggccccaatacctatttgcttattctttggcgtctgtctttccggagcatggtgtttgtcgctttttggacactggtgttcagtctatcgggtgttttgatatagcgcttgaattatgtatctgttttgcttattattgcgaccactcgggttgacttgctttatcctgtctaattgatgagttactctctgtgttatgtcttatgctttacgatgtactccgcgtctgcctatgaccctagcaacgataaaatgattattttgatgactatctcgatcacaaagtaccatttcctagacgtagccaatcatctagtaatttagtagcgtctgagtcaggtgacatctcgatattttgtgcagtacgccgcaattcctataccgatcagtttgattcactcgacagttcctgtctcatgaactgtgccacgaacctcgcctttggaaaattttacgcattctactacacaaattgagtatatcgttgtcggtcgtcacagctattgcccctgaatcagtcaaaagacgctcataactacgcaaacagctcaacgagctagatccgatccgatcggcttttcctacctaccatcggccttcttctggccctccagtggagtggcactgaatactcttggaataacccttggatcatcgttcttttcgtacttattggtgttcttctgcgcgcctttgtagctgttcagatctgccagaatgagaaggccacacctccgcgtatcgtccgaaatcgacacatcttgtcgtgaacctggtttgctatcacgcttaatggtgctgaatttgtctttatttactacctaggctcagtccatggcggctcggtgttcgccaaagctcaatttctagctccctttttggttacaggcaatcaaaacggcctcgactactaaatcaagtgtaatgaacctgccgagttatcgttgcagtcgttgccgtgtctattctatccggtttcctcgttatcatgcccgattacaatccaaccacaaaccgtcttcggtcacattagcgatttgaggccagcctactcagtaccttgaaggcagactcggggagtggcggatggattggctaccagattctagttagaatcggtgccgttcttggattgcaacagccgagccttttatgtgggcgtgggtttagcatcgctttccttcgttggaacgatcgcgttggaacttaagtctgccaataagccgaggaacactatacccaatgatgacactgcaatttgagtctggatgtgtttgggggtttgaggtgtatatagcagagctaaacgatggcatgacgtcatttccgggtcccatcgacacctcgtctccgcctctaggtatcttgttagagccaagcaacgaggccatcgctggggcaggctggattgaagtgtcagcgaggcaagttgccttttttctctcctcttcttttttctcgccacaaaaccttgagggcgcatggatcctccttggcataacttgggttttgactcagcttccttaaagagtaaaagggcaacctgcattggcattttcccaaatcatgtggaaatagtacacgaagaagtcccttgcataatgtgacccatctgatcggtacataccaacgtcgtactccgtacgtagcacgaggcaatggaaattattaagctgtgacacataccaagcgggatatttaccgccactgcatgagacacgtcctctacagacatagtccgggaggaaaatggaagcatgagctattgccattgtcgtagaatatagggcccacactttcattgggatgatctttagacaacactccacatctctaactcacttcctttctggacaaacactcgtatcagtataccacaatgacagtctcttccactgtccagcctctcaaggcctctgtgccagcggtcgcacaaacggcagatatgcctcatcgtacactcagcaagtcgatgacctttgccaatctagaccaataccaatattggcatgccgtcggtcctatgctggggaggatgctttccaacggcaactacagcatccatcagcagtatgaatatctgtgtctcttcgcacatatcataatcccaaagctgggaccattcccaggcgggagagacatatacaaatgtctgctcggaggcaccggctccgtggagctcagtcagaatgtccagaaatcaggcttgactgcacgcattgctttcgagcccacaggctacattgctagcaccggagtcgacccgctcaaccggcacacggtgcacgctaccctggccgaattgagggctatcgggtctgccaccatcgacatggagctgcatcaaatgctcgtcaccgagctgacgttgacggaccgcgaggaaaggcttatgtccccgggacagatctccggaactgcgtggaagacgcaaattctgcttgctttagatttgggacagtccggcggcatcacggtcaaggagtatttctacccagcactcaaagcctccgtgaccgggcaaagcgtggccaggttgtgcttttctgctattcggaaagtggacaaggagggaattttcgaatctccgagtaaggtcatcgagacctatatgcaaactcaaacccagacagatctctactttttgtcctgtgatctagtcgatccagcgcaaactaggattaagctttacctcatggagctagacatgaggctggcaaaggttgaggagcactggacaattggcggcaagctcaacgacgaagagactttacttgggctgcaaatgctgcgagagttgtgggtggagtttgggattattgagggcatgcgcaatgagccggagcggccatcgctgcccggggatcccgacactattgttccattcatcatgaactacgagatgaatcccggcgaggtattgcccaagcccaaattctacttccccttggttggcatttcggagctgaaaattgccaacgtgctcactgcattcttcgaacgctacgatatgcctgagcaggccgcagtctatcgcgataatttgcagacatactagtaagtttattctgctgctacatatcgcaatgcttcttgctaacctcgtgttatatcagccccagcaaggacttggctgtcgcaacggatcatcaggcttggctgtccttttcatacactaagaagaaaggaccgtacctgactatgtactatcactagagattttcatgttgatagtcaaggtacgtttgaagcagacaaactagcgcggcttagattgagttgggatgaaataaatgcgtgaacgatgtctgttgtgtgtaatttagaacatactatatactacctggcagttgtgggctcgatgaaaagcgtaccctgcatttctgtacctgcacttgtcggaaagatattgtgcttatgcatcgaccattatgttccgatcacaccgtgcagtgtgtcgatgcctgttcgttccaggaattagtgaatctagcacatggcacacctacaccgctgcataatgaggtattcgaatactccctacaaactgtcaccagccggcagtaaaatacaactgattcacaagcaagggggtattaaaaattctgtagcgcatggcagttttcagctgggattgaactactaagcctatttagaaaaaaaaaaaaaaaacgctcaaaaccaagaatggctcgagaatggaaacttgcaggatagtgacatgcaatatacaatgtcatcggaggtaagaatgtgagatggtatactagttccaacgtaattagacacgtggatagcccgagatagaccgagagcactacaggcagccacggatcgggcaggatgcaagggggatttgccacggccacggcccttctggatgcaataaaagaatgaccgccgagaatcagatattacctacatctgatgtttgcctcccggcagtgcattccatagactatcgattgcctatcgatctccgtcgatccgggttgcgagtgggactgagagaaggcctacttcgagatcacgcgacgattatatgtcgctgcatgcaagtctcatggatcaagtacggcgtggtcacggctgctagatggtagtgtgccgacgaaatttggagagagtcaaaccttactccatacaagatacttgagcattcaactggtgttgtgaaatctgacttgtcaaaagccaggtggataccccgttgtttgaaaatggacatgagcagcgaacaatattcccagtaggaatgcaggagcttcaataaaacaagttcaaacgatcaatataatctcaatctggcttattaaagtagaaaaaagcacatatactatatcgcttccaggataatctcctgctcggcaaccttgaaccacgcttcgcctcgtttccgggcgtcctcctcattcacagcagactttccagcggactttgactcataattttcgacggtgtacgcaaccagcaccttgaggatcgtatctgccaaggcttgcgcaatacactggcggggcccgaagccaaaacgccaaaagcgataccgaaagctggccctagattcctccaggaaccgccggggccggaaggtcattttatcggagccccacgcgtcatcccagatattcagcgcattggtgtcaaccaccatgaaggtcccacgaggaatgcggtatccacccacatcccggtcagtgggcatcgattgcgcataggtgtagttggtgactggcttcagcctcgcagattcattgatacaacttgccagcagagtggtgttgcttgcaatgtatttgacccaagactctggagttgtgtcggacctggtctgtgagatctctgctctaagctcggtctgtaatccgggatcctcagccaggaattgtgggatccaagagaagctgccaatcgtcacatcgatgttggcaaatagtgcttcgtccaatgtatgcatcagctcggttggcgtaatctgaccttgttccacggccctatacaagccaacaatagcacaagcagaggcatcgtcacggttcattgcatattgatacgccttccgattgaagttagcccagcgagtgtggaagacgtgaagcttgttccttatagccgggtaaaatatcttgctgatggaaaagagtgacagaccacccttgaaggcatattgaaacacatcggtgcgcagatcggtaatgtgcaacagctcctctgtcatctccggggacaagtttccatataagaggtcgctaatgacccagaagggcagaagcttgagatcctcggcgggcttgattcgcagcgttttcccgccttcatactgcttgtataactcggaaaaatggcgagaaatacgggaatggacaaatggaacgtatgtcgtgggcttctgggtaaagggtggtgaaactacagcatggactcgtttccagtgtccttgactgatcagaccgacaccatcgccgactagatctcccattacccatccaccatttaggtttgaagccttgtggtggttactagagtctttaaagaccgtcttgatctcatccgcgcgggtcaaaatgctagacttcatttagcctgagcagttcatcttgaagagagcgaacttacatttctggcgtgagtccaacccagatgcgatacaccgggccatatttctcggcccactggcgagagacattctctccttccaggaacttgatactccccccgccatctggaaatcggtagggacaagttggaataggcgttgagccatctgttgaatatattggataccaccagagtaaaaatctctacgttggcagtcagcagagttctgttgatgtactttcggggtattaccgacattgattatgcaggacactactcgatttgaccaagtatttggttgaaaggagtgccacaaaatgactaggagtgatacaactgccagttgcagcgtaagaagaatgtaacctgacatcatgtggagctgacgttggaaagaaggaaaagtaacaaacggaggatataaatgacgattttgaattcgatttgtaatcgatagcatgggtgtaacttcccaaataggtacgtgcggtgatataaaggaacttattacagttcccacaagtgcggctgacaatccgaaacgacatcaccgagtagccagcatcttacatgtacgaagtacatgtgggtccaacgttgatgcacaaggacgaacatgcatggtcgcctcgcgttgattccagcgagcgcatggtgtgttatatgcaagggctagtgaattgttgcaggtgtagccacgcactaagaataattggtggtcagcctcagcgtggcaactataacgacattctttctgctgacagctcattcttggctatttttgaagatatatcgggagaggtcatttggaccgaagtgaaaatgtaccatgtacttgttaccataaaagaaccatcatctatcggaggaagcttgatctcttagaatattgtccaccatcgccatggattcttatcatggtcgtcataatatttccattcctttgggcaaggaattggaagtgaaatgcactgataatggtgtacctcattttctcaaggcatcatgggccttgttgcttgccaggctctcagaaacgcaaacgacaacatttgcagtattggaacaaccggtggtccctcgggatgcgtgttcgaaattggtggcttcatcttcacatttagagacatgggaaatatcagacaatccggatatacttctggtggatgcagcgaaggaaaagcacagagaacctctttcaggcacacagacctcgacgggtgtggtcatcaggtggcatgatgcaccgaacagtccaacctcggtaagaaggactcgatacatgtattcttcgcaatttactaaaagagttccagttgccgtgtgcattcaatgcaatgattgttttgggttgcagcagatcacccggtcaagtatccttggaatacccaagaacatctctcacagtgaaccaagcctggtcacaattgacggctacacttcacattttggaacaaatggttatgaccccagggttatcactccgggaagtggatttcctgggctcatatagcagcaggttaatccagcaatggaacaacccgtatacactcgcacggccacaaatatgcattcataccttgatcctggagcattgtcggagccaacccgatgccgaggcactgtgtgcttgggatggttccatcacgtatgcagagcttgacaaattttcactcgcagtcgcgctccagctgctgtcaattggtgttggcccagagtcagtggtcccgctctacttcgaaaaatcgagctggacggcagtcgccattctgggagtgttgagagcgggaagcgcttttgttctcctcgatccctctcatcctatgacccgtctggtcgatatttgctcggaggtgcaggcaaaagttgccatagtctgggattcattgcaggagctgggtcgacagctgggtcctcgagttatcactctcctcgacacaataaaaagccacgtcgatacaaggagaaaacccttcaacacacaagtcaagccttcaaatgccgcatacatcgcttttacttccggctccaccggcaagcccaaagggatcgtgattgaacaccaatgcttcgttgcaaatacgctggctcagaacgcagttcagaatattaatcaccaaacccgggcgtttcagtttgcctcatatgggtttgatagtagcattcttgaaacactcatgaccctggtggcaggtggttgtgtttgtataccctccgaggagcagcggctcaacggcctggcagatgccatccgtgggatgcgagccaactggctcgaactgactccatctgtggcacgattcatcaaccccgaagaggtaccgcacgtaaaatctgtcttgcttgtcggagagccgatgtctcaagaccatatcaaacaatggtcagggtcgaggaagatccaactcctgaacgcatacggccccgccgagtgcagtgtggtagccactatccagccccatgtggaagtggaagatcctcaaaatatcggtcgctcatacagcagtcactgctggatcgtgaatcctcaagatcatgatcagctcgagcccctgggtgcggtgggagagttactcatcagcggaccaatcgtagcccgaggttatctcaaccagccccaccagaagtctttcatctccaaccctcgttgggcgacgcgatttggcattcctccaggcgaacgcgtttataagactggagatcttgtgagatataatgtcgacgatggcgcgctgcgatatgtggggcgcaaagaccgggaggtcaagattcacgggcaacgtgttgacctgcaggaaattgagcatcatgcctcccagtttcagaagggaatacttgcagtggccgatgtgatccaagtcaacggtagtagcgcggggaaactccttgccttgtttatttccgctgataatgatgatactcgcccgacgaagcacagtttcgttgtccccatgaatgacaccctcctcgatttggtgaccgacttgaaacactggctgcgtgactgtctaccaccatacatgatcccaaccaagtatatgttcgtcaatcgctttcctttaacgagaactagcaaacttgatcgacgagccttgatcgatcttgcagcatccagtcacccgccgacaggagagcatccgtcaaagcagcgtgatagagaagatgtcgagctggacccggagctttttgccaagagaaaaatattgtgctccgtatttgctgaggcattgggctgcccggaacggaacatcggtgcagaggacggtttctacgacatgggagggaattcattggcggctatcgagctagtagcccgtgcacgcaagcgtggcctggaaatcacggtggcggatgtcatccgtcttcagagtccacgagatattgcgcgatgtaccgtggaaagcaaaggggttcatgagatctcgccattctctcttctcgtagaccccgagcagagtctatccgccgcgacagcccagtgtggcgtggagagagcaacgattgaagacatttacccttgcacccctctgcaggaaggtctcatgcatctatccatcattaccccgggagctttcatgggcacataccgattctccttggctccttctacgaaccttcatcggatctgggctgcatgggaacagctttggcttgtacatcccatcctccgaacacgcataattcaacttcaggatggtcaaaagcttcaagtagtcatcatgcaaaagcttccacgcaaagacattttagtcgtggatgattgcgagccgatgagcttggggacaccccttgcacgtttaacatttcatcctggacgggcttgcggcggatctgactctggaatgttcattttgaccatgcaccacgccctttttgatgggtggtcatatttgcagctgctcgaggatctccaggtgatttataatggggacagattgccaccacgccccgccttcaatcatgtcattaactacatctctaatttgaagattgaggaaggtcactctttttggcgtcaacagttcaacgatttacaagcaacaatgttccctatctcttcccggcggtcaatcgcgttgccacattggcaagtcaaaagccagcaaattatcctggcgaagtcggatatgaactggaccctcgccaataaaataaaattggcctgggcccttgtgatctcttcccaaactcactcggatgatgtagtatacggattaacagtctcgggccggaatgccccagtaccagaaatcgatcgtattgctgggccaacttttgcaacattccccttccgcacgcagcttcatgaccagatatcggtggaagatatgttgatccaaatgcgacatcacgacgtctccatcatgccattcgaacatattggtctcaggcgtatcgcggagtcaagcccagacgcagccctggcttgtggattccagaatcttctcaccgtcaggttgcaatctcttcagattcctccgggagccttgattgatttacccgagaatgaagatcatgacctgaaatttgcgtcgtatcccctgtcaattgtggcccagcaggagggcaaattgctagaggtcaaggccatctttaataccgacattctaggatctgacaggactgagtcactgctagagcagtttgatatgttgttacaacgaatccttcgggagcccgggacgacagtgagcaacctgagacgtcagctagctcccgagtggcagcaattagcggcgattaacaggaagatctcgcccgaactgcattgcctacatgatattatccaggacttcagcgtcatccaaccaaattcagaggccgtctgcgcatgggatggctcactcacatataaagaactagtctcgttggcgtggagattggcaggccatatcaagtctttcgggtcccggtcggaacccggtgctgtcatcgggatctgtgtggaaagatcgaaatggtttcccgttgccatcctgggcgtcatgatgtcgggagccgccatggttttgttagaacccaatttccccgtgcctcgtttgcagcatatcttgcgagacgcaggggcacggatgatgatatgctctctggtattccaagagaagtgtacgggcttggtcgatgatatgttgattctgactcccgatattgcgacccgagcggactacgatacttggactttaccatcggtgtctcatcaagatccaatgtatgttgcttttacatccgggtcaaccggtgccccgaagggtgttgtgatcgagcatggcatggtatattcgatgctcgaggcacataaggacataattggcgcatcaaatgggtcccgaggcttgcttttcgcctcgcccgcgtttgatatatgccttgccgagattgtacttatactcggtgccggaggctgcgtatgtgtgccttctgaagctcaacgcatgaacagcttggcgaaaacgatgacaaccatgcaggtcaacatggctatgctgactccttctgtggcacgcaccctctcgccagctgcggtcccttgtctccaaactctgattcttggaggagagccgccatcagcctccgatttggcgacatgggcttcacgggtccagctgcatcaatcctatgggccagccgagtgcactatgtacacaaccactacaccgccattgactcccagctcggacttgggcaacgtcggattttctccaaacgcgtcatgttggatcgttgacccggagaaccatgatgagcttcaaccggttggctccgtgggagaactattgatcggtgggccgattgttggaagaggctatatcaaccgaacccaggagtctgcagcggccttcattcgtgatcctgtctggagcgagaacttccccttcttacgaggagaccgactgtacaagactggagatctcgcttccttgaatgcagacgggtccttaactttggtcggccgaaaggatacacaggtcaagctcaatgggcaacggattgaggtgcacgagattgagcattgtgctgaaaagtaccaacatggtaccgcggtcattgcggaattaatcaaccctgccggcatccagagacctagacttgtcatgttcctctatgatcctgcgacggtagaaacaacggtgggcataaactctgcttgtcttgaacatcgggaactattgctcccaccgtcaacacgaaatcaagcttaccttgaaggtgtaagacatcatctcaatcaataccttccaccgtatatgataccatccctttttctttcgctgtcccgtctaccgcttagcccaagcggcaaggccgaccgcaagacactacgccagattgtttcgaaaatggatagagagacattggagatgtatatggataatccggtggcagagaaaagggaaccaacgacagagcaagagcgattcgtccgtgcaagtttcgccacagccctgtcattgaatgaggaggctgttggcatggacgataacttcttcgctctcggaggtgattctattactgccatgcgcgttctcactttgtgtcggagaaggaacatggccatctcgatgcaggattttctctcaaagaacactgtatccttgttttgcgcaaatgccattgtgattcaggcccaaactgttgattccaagcgccagaaagccctgaattccgaagactccgttcgagggaaaaattatcttgtccagtttgagcatatcgaataccagctggacatggttcgatctcggttgaatttgttgaaatcggattccatcgaggaaatctacccctgctctgacgcccacagtggggtgttggagctctatacgtccaactacacaagcactgcaattttcgaaatttgttccaccgaatcagtgactgcgatacaggtgagcaacgcttggaatcaactagtgcatcgtcatgtcgccttgcgtacagttatgatgaaagaaccaaaggttcatgcagattaccttcatgtagtccttggcaagggaccagctcaaattcttgctcttccttgcagcaagaatgccctcacagagctgaaaaatctcgaaccagtccaattctggggcctgtcaccaccacaccagttaataatcggacaggacgattctggggcggtctttataaggctggaaacggggtatgccttgatcgacgccttttctatgaccattctactagaagagctttctctcctcctccagggtcagcccttgccagagaatggagtctcgtaccgtcaatatctgtcccatttacacagccagtcatctgcagaaacactgcaatactggacacagacgctttatggagtttacccttcccacctacccaaactccctgccaaaccgtcccctctacctgaaccgcgctcgctgagccgctgcctgccattcgcgcaatcaaagcgtttagattccttctggcgttccaatcatctcaccatcaccaatgttttccagctggcatgggccttgactctcacccactacacccattcccgcgacgtgtgcttcggaaccatcacctcggggcgtgatacccctcaccttgaagtatggaatattgttgggtcatttttcaacattcttccgtgtcgaattgcgattgatcccacgcgcacggtgttagatactctccgacagaaccaggaggatattcagcgtcgaaacgaccatcagtactgttccatgccagatatgatccgaaaatctggaataaggagcttagacaaggaccagcagctgttcaatacagttttgacagtacagaacccattctcgacacgatcatctactgtaaaggatgggagcaacgagatcgatatcaaactcatcgatttggatgatgcaactgaggtgagggcctttggaactaggaccacgatcagaccgacaactgctgactcttttagtatgacctttgcgtggctattattccctcccattcccacttgaaggtggaattacgctactggacgacgaccgcatctgaggaatatgcttcggatattctcgattgccttttcaaccagctggaacagattgtgcatcatgcgaccaagccattgagcgccatcaccagtattggatgacaaccatatctcccaggacttccataatttctccttttgttatctaattttcggcattgttcttttgatatttccacactttggattcgcagatattcccgagtcccggtctacattattctcttagcacaatcaacaaaacaatataaagcatgaaatactggataaagttggttaggacttgtcgtccatgcaagtctacgagtgctcaagcatccgattccaaggcaatatcatatcctagaactggtctaaataatagaagagaaacaacaaaaagacaacacatagacagccaccaatatcgtggtcaatggatgaaacgccattcacacccttttccatacccgaacacggttctaagactggttccaactcaaattttgagggagccggtcgcggaagggaaaatatcgaaaagaaaaatccatgtacacaaaagaaaaggggaaaaaatgggaaaaagacaaataaaaggcagggggcacaggttgagggcatcggtccggacgagtaccgccgaaaatctcaaacaaaaatatcgttgccccatagtcgctatgtcatcacagtagaaaataaacggaaatcacatgtccatcagcagtccatctcctccgagacattatttggtggaattgcttcgatgcaagatctgtacattggttgcactggtaccactgccgaccgatcgtcgtcgcgggcgaatctcactgccgcttccgctccttcgccgtcggccggtgcttcgaatcgagcctcggcgtcgtgtctggagcaaacggacgttttcacgttagaattacgctggctgtacatgggcggacgcggtctcttagcaaaagacaagtacgagggcgatagggccagacaaaagggaagtagttcgcataggaatgcacgtatctgggcagcaaagcagcacggatcagagatgcactggacttaccgaattaggggtgccttcccggctgggccgatccttggaaatatcgggatcatcttgcaactttagggagttcaaccgcttttggctctcgtgagtcatggcctctacctcatcgatcgcctccggcacgtcaagagggggggctggtggtgggggaatgccgttcttccgatctttggcctgttgctcaatcacgtcccaccgttccgaacgaatcttttcacgttggtctgcgttgttctggtgctccgtgtaatcgtgagagcattcatcgaaaagttgcgggttgatctccatgaacatcttcatggcattgtaaaccatgctgtggattgttctgggaaaagagtcagttcatatttaagcagcacatgcagatcaaactcaccggttccagtgtcctttcgagttctcgtaaagtggcgcaaacataagagggagaattgtctccacattgtcgctcacaagattacagaaatactcgttattccagaagtacaaagcacgttcagcaacctggaaatgaggactggcgacagacttggccaactgattgaacagaggctcctgtactttagcgaactcgcccggatccatcacctcgaagatatcttccacctcattcaggtacataacctccttagtgctattggtcttaggccagaagcgcagtaggccgagaacaacctagacatagtggttagtacccgaagtagattggagatgataatttagggcttacatcttcggtcaatgaggagtctttctccaaaaattgcactatgcagtaggccaattgcgggtggtacatgctgagactcttcaccttgtgcatgggtaggagcactctagtcaagaagagcttgtgttcctcctttagcggtaaagcgaacccgttgatgatggagcccagaatctcaagcaattcggcgattccgttatggcgttctgtctcgtacatgaactggaaaaagacgttgttgatggatcggcggatatatgaccgcaaattcaagaactttccatagatgcgatgcagagttgtcttgaggaagtcacgttcccggggatcttccgagtcaaagagatccaacaactagatgtagtattagcttgtattaaacatggaaccgagcagcaggagacataccgaaagcacaaactgatggtcgatataaccctttgcgatgttcgtgttgaaatcctggctttcgatgaatctcaaaaagaattcatataccacctggatatgaggccaagcgacttccaagaccggctcatcctcctctgggtcaaatgcctcaccttggggcgtcataggcgggggaataggacggaacaggttcttggcgaacatctctaccacgcgggggtacataggctctgtaatgaccgaccgattgttggcaacataatctaagagttcgtgcagcgccagcctcttgatctccttggacttcatatcagccgtagggtcgttgaaatcgaatatgatattgcactggtcgatcttttgcatgaacaaatcttggcgccggttgggaggcacttcgtggaatcccggcaacttctccaattctctctgacgctggtcggagatgtcgaatcgcgacgaatgttggcgttttggggtccggataccttccgagatgtccttaggagttgtctgtaggcgatcgaagacatgggacttcctaggaggtgcaagatctccgggcattgtttcggcggcaccaggaggggggacatgctatgtaatccaatccattagaaaattcaaatagtgaaagctgagccaactggacttaccggtgggcttgggctaatgatgacgttgggggccgctggttggccttgcctattcggagttcctggtccattgcttacaggctgtccggcagtgcccggttggggtatatagtgttgaaccggggtgccggggtgaggtgcgcccgcagaaggggttccggcgggggaagcgttgtctggagatttgtttcgcgagtcattgagagaggttgtagaggatgtgggtgtcccttgactaggggaagtaggctgctgtgcgctggaaattccgagggattggttctgtggagtggagttggagtctttctttttcgaggacttgttgtctttcgcccgcgacaactggtcgtgctaaaagcaagacacaaaatgttagcttatttgcgaggtaaatgaggtagcaccagctgcaaggtggagaagaggatagattgccagaagtgatagtgcggtgaggtgcacttggacaggatacgcgggtaactcacgactctctgtctgaaacccttcattttgatgattatgtagatggccacatgtactcggctatgtttcttggtgccagtgcagccaggcggcgcactctagccggaatatatcgaaggagccaactgaaatagccgcccaagatagccacgagggggtggggggacaagtgtttgaattgacctaataggagaatctcataagcggtccgagtcacacagcaggtaagacggttattgtgaagggagatagttctgaaattctgatataaagccctgggaatgcgtggaggagaagctggggttcaatggcaacatcatcaggcgctccaaacaatgtgcagtcgcagcacgcgcacggagcaagacgatgataggaagaaagggccaatgcaggcagtgggagacgagagtccgatcaaacgtacctctgtagatctgagttggacaattgacggatcgagtggcaaatttctcggcgagagcagttgttataggacaagcttggtcggcgctggaggatctccgtgtcgcttagtggcaggctgggagcggggggtttggtagcaccagacgggcactcaggtcgcagcccactgcgaaagcacgaaaatcacggtctgactagcaagagacaaagtggacgatgtacaagagaccaagtaaagatgatgtcgttgggttgtggagaggggagagggaagtggattgttgttgaggtgtagggaaaggcgggctagttctcctggctgcgatggtgatgggggggaccacgcccaagtactatgtggtggactttacgttctggctaagtggcctggatctattcgccctttaatttgagacaatgaatttactcgacagctatattattccccccttctcttctcctaacatcactttggtatgctttttcccgcttgtttcaaattatgcttatgtcatggctcacgtgacctataaaggaactcgaatttcaggcacagacagcaacgccaccaacaccggacacccaggtaactgactctacctattcacggagtagctaactgactagttagttagtcaattagtgattgaatgtgtttgcctattatttaagtctgaagaagtcagatgtagttcacatgtgatatatcctttcgagtcaagcaaagcaggtctgtgctctacgacaacaatagtctacaacaacaatagctgtgtgaggcataaccttaggctacagaggaaatttctacttgaaaggtctcgatatttccgaaaatcaatcttatggcatatcataaggtatagcactgctgaatgttgtcgcgcaaaataattcggagaagtggacatatatatctttccaaaggactacattagtatttctctccttcacatcaccacaaccaacgcggataaacacctatcagccttccttacttgcaatcctcgccatacttcccgatctctgtttctttaccaactaaacccttacttgaatactgaccgttacttgatcactggctcttactttccttcttcatgctcaacggtctttgacattacctccaatactcttagcttccaccatggcggacttcatcatgcctcggatcgcatgtcaggatatagacgcgctatcttcggacaaagagaccaagcccctacgcgagtcatgccacgaaaccatttatctggatactctttggtgtctgcaatgttttcgcttccaagtcagcaattggaatgatgatagttaccccttttatgtgatgtgtcgaattgaagtcggctcgccacaaaagtgttgcgattgcaaagaagccggctacaaatgtgactggggaagctttgactcttgctaaacctgtgcttgaaatagatgcttacatcgattgggatcttctacagatcccgcagggtattcggggccatgtctttgaactgatggccttgatcgaattcgcgaaaagatactggaccgacaacggcggtatcggcggtgtacccatgcatgtacgggtccggtgtgaagatgtccccgaggaacatttccccgcgttaattgagctctttcctgcctttgatgacctagtcgagacccatatgaaggctcatatgctgacaggcaatggctctaacgtgagttttgttcaacgtgttctacattcgtgaggatattaatcctttacggtgggctttcgtgattgtatcaccggggttatattcacgatttgctttttttttccgccagcttcttcattgtgaggtttcctgttaatagagtggtgaggcggctattgaccaggacctatttgatgttttcctgcctggttctgtggttgtttcagtgcccttacatagcatctttttccagctttctgcatcatttagaattctagactctaccaagcgcaaatgatcctcatatttactaggcgaagacataaggtttaccaaacaaggtcgacaggataggagatagcaacatcggaggtcaaaatgcacctcataactaacagcgtctacattagtaccgcaaagttacgagaaaatatagaacgcaaagagaagagacactagacttggagccaaaaatgtcccaaaagtttctgatccgtttatcattgaccactccctagaagtatagttaccagaaagacagaaattgctcgaaccaactaattacatttgatattcaccgagtttcgttcaaatccatacaacctcattgagtcaacattagaaccagcgatagtacggccatgagggctctacccaagctcaggcgtgtgcttgacacagcactatttttctcacttgtgctactaacaccggcagctgtattttcctcagcatatgtgtagtaaagactagcggctgtctgcgtgcctagactatcagcagcagtggtagtgggcaaactggccgccgagctcgacgaccattcttttgcgaaaggatagaatcctgtcgtttgagggttggcactacagtagcgctcgagacccccatcacgtaactctgcgggaaccagtggtagcctgtgtaaatgttagtttttcaatcaaaccagagaaaagcatagcgccaatatattctgtggaaaagacccaccctcaatgcctccatgttttctgaaacactcctgacaaccggccgctgagtcaaagaagggatatacgtcacaatagcattgctgctggacatcccaatggtccgaatacggcacaaggcctgaaaatgtgccgttcatgttccagaaataacaattagaatttaattcccgcttgtcgttgacatggagcctcgtcgatcagatatgtgggcttgggaccctaggtcgcgatagtagagttaggtaagtactctacgaaataacgtaatcggtaagcgagccgccactgtaagcgagccgccaccctatccaaaacgcgtccatgaattagcacctagttagttcaaccacccaccatgccaccaattcgctctcaatccgctagcaaattagaacagcaagagggtaggcttttattagctatccaggctcttcaaaacggagatattagctctattactcttgctgcgcgtacttttagtatcccgcgtacaactttacgcgaccgcctctctggctgttctcaacgaagtactacacgcgctaactcgtctaaattaactgcaattgaagaggaatctcttcaaaaatggattctctctatggattctcgtggatcagctccccggccctctatggtacaagaaatggcgaatcttcttcttgaaaagcgcggaactaccccagtcattttggttggcgaaaaatgggtttacaatttcataaaacgacgccctcttctttcctctcggttcttaagacgttataattatgagcgcgcgaagtgtgaagacccaaaaatcattggagaatggtttaatcttgttcaaaaaactattattcaatttgggattgacccagacgatatttataacttcgataagaccggatttgcaatgggattaattgtaacggtaaaggttataatcccggttctttcggttggcgaaaaatgggtttacaattttataaaacgatacccttctctttcctcgcggttcttaagacgttataattacgagcgcgcgaaatgtgaagacccaaaaatcattggagaatggtttaatcttatttaaaaaaccatcatttaatttggaattaacctagacgatatttataacttcgataagaccggatttgtaataggattaactgtaacggtaaaggttataataagaagtgaatactacggtcggagattacttttataacccggaaatcgcgagtgggtgactgcaattaaatgtataaactcggcaggatgggccctccctctgtgtattatttttaaaggtaaggtcttccttaaatcatggtttaaaggccttcctagcgactagcgctttgaagttagtctaaatgggtagatatcagatgaaataggccttcgttggctacaaaagctctttattctaactacttcttcttgtataaagggagtatatcgacttttggtactcgatggccatggaagccatttaaccctaaaattcgatgagatttgtgagaaaaataagattataccaatttgtatgccactgcatttatcttaccttttacaacccctcgatatcggttgttttgcggtggtaaaacggtcgtacggccggttggttgagataaaaatgcggactgggattaaccatattgataaacttgagttcttagaagcatatccctctgtacgaattgaagctttaaaattggagacaattaaaaatagcttcttagcagctggtttaatacctttttcacctaatcgggtactttcaaaactcaatattcatcttcgaataccaaccccccctcccagcaggggtagcgattcaagccggaattttaccccaaaaaccccttttaatggcaaagatctacgtcgataggcttcgtcaatcaaagctttacttcgtacccaatctcgaagcctaataagcccttctaagtgtgcattagatcaacttgtcaaaggctgctagattgcaatgcatagtgctattctactagcaaaagaaaacaaggatttacgggatgaaaatgagaataagaagcaaaagcgggctagatctagacggcagatacctgccgaagaaggcctctcagttcaagaagcttctgaaataattgctagactggtggaagcatcagaaacacccctatatcccccggacggaagcactcaatcagggttggaaccacgaccacgggctgcaccaaggtgtagtgggtgtggaaagatagggcataagatcaataggtgttcagataaatgatcctttttagtttaattaatttaatggcgttttggttgaaatatattccttagaaaactatactcttgggtagggtggcggctcgcttacagtggcggctcgcttaccgattacgttagttagttacctattttaccatcctccttataatgaccgtcgctatattactttccctaattaacattagttcggataccactatagaggatatagtatctatagtagtttcgggcatatacccctcttacttaatagtttctattttccttttttaccgccgcgtccgtggtgatatctcccgatataacgataacgaggatgatattattaacgtgcccggtataactaaagcttatctagggatccttccactacctcggtatcattagtaccatgattaacaggtatacgatcatctatattagcattgtcatctttttcagcttctggccaagtataatagacccaatagtagagacaatgaactagagcattgtggcaatcgggggcagcgtcttccttgccattatatactacgttgtgcgcgcccggcacatctacaagggtcctattgtggaagtctccttatagagagttgttgcatagactttgagggagaggctaatagttcatttttagcttttcataacgggtaattaaagtcaaggtggtaaacataagacattagtaactttgcactccaattgagctattctcaaaagacaccaacaaccctttcccgtcgcctttgtgtggaacgggtgatacgcctgtaagttcagacttcgattcatggttttcagtacgaagtgacgcaggtatccttgcttgaggccaattgggtcggtctactctccatgttcttctatatacagccggatacaatgttggacctggactcaacgcacaaggtcaaacaacaaaaaaagacgcgttcaggacgctggtaactgatcaatacaaagtaatatacagactgttaaccccttccggtgaagttaacaagagcacctaaaacctcactcaaataatactacagcatgagtggagtccgacatatgcaaatggcggtgcgttttcaactttttcaagtcgtgttcaatcgtaatccatcccttggatacctcttccctttcctgggccgtggattctcgcatctcttcgagtccttgcgaaattcgacccattacaatcatgcatttttgatgtctgcctagcgagtcattgatctctctgactatcccgcttaggggatatcctgctagaccccataaccctgattaagattagcttgtaaacaataagatcacagaaacattgcctgcatgttccacatacctgctgtcggcttgagaaacaacccaccgattcctttcccgatacctttgagaagccccttagcacctccgtgcttaagaccacggtgcggctgtgttcctaggcccttgataccgaagtaaaatccatctcggaactcctgtacatatgttagaatatctggccctagactggcgctggtatggctgttactacctttcctgccgccctgaacccgcttcgaagattgaccacctgggggatgtcggttactgtcgtgtcgttatataatttgggtgcgttgtggaaacctctggccatgctcagtgacaaatcggttggtaccactatgattatcttcaataatttcttggacatttgacttccgtgtaacgcagcttcgtgtaaaatagtgaatttaggtggatttgtcggtgtcatcgagctgctcattgtcttggccttctcgagctggatattccttttgcgttctgtgctccgaatacgatcaatgctgttgacatcggtttcattgtccgcatcggtagtatcttcctgggcactctccccttctaggatttcaccatctcgctgttcctcattctcaatctgcaattgctcgttctcattttgaatctgtgtttcctcagtcccatcactattctctggagataaatgatccggtgaagaaagtactgcccgacatgctgcgtggcgatcaaaatgttcatggggttggcgtattgagcgagcagcagaaacaatatcatgcacaatctctctgggagcatcgacaagcccagtcacgaagctcgtaatgactccaaagagcacctgagcactagcagtaagtgggtcggcagggtccagcaatgtatcatactcgattggacggtaactggaggcgaatcagcaagaaactctcacagctgtggtgactttgtggaacaagacttacagcacgagcatatctgggctgatcttccctgatctcactagaaccgttgctgcaaaggcactgaggttgattttggtatgtttgagatgccaagccgccggctgattcgggactatagagcatctgtatgactgggggtcaagatttcgatgaaagctattcaccccatggcgcacgccagactcttcctgcattttcaacgcgatcgtctgtgctctctctagagtacttggctctagcgctttcgcgattgcgtttgagagattctgcacgttcaaatttttatgtggtattggtgctggcccagctccagcccgcgcaacgatgtttccccagaattgctggtctccaaagaaagggacaattatcgtcggtcgacctagcgcgagccctgccgctgtggtgccagcaccaccatggtggataacacatgaaacctgccgaaacagccaatcgtgagggcagtttccaatcatcagaatattgtccggcacttcgtctgcccccaggtttccccagccttttgagataagagcccgctgtccggaatttttgactgcttcaaatatggtttttgtcagtttggtaggattatcaactacgatcgagccaaatccaatgtatattggttttggccctgcgtcgagaaatgcagctatttccgttggtggtgtgtagctggtctctgataggaggaagccaaagccgcatacatcgatgttatcagcccaatcagggggcttaggtagtaatgaaggggacctgtttcaaatattagaatacttttgccaaccaggaatatgttactaaccacatatacgtatgtggcacatgtagtcggtgtagtatgcttggggcagtcattgtatccaggggttggagtgccaaggtatttttgcgaagtgtgttcagaatatctcctaatccttcccataccatcatatcgacgatattgtaggacacgaaatttgcgaaagttggcttgcagttccggcggtgaacattcgctaacggatgaggaaaagactgggttggtgaccagggcatcctattattgattaggtgttcagtatatgaaaggcgcatagagattactatataagagggtcaactcacgtgaatataatatggagagggatgcccagtcgtcgggcgcaatgaatatgggcaaggctaggagggtttgctataatagcatccgccacaaagggccgctgtcggtaatccactgtcttactgaatgggtcttccttaatctggtgaaggtaagtcccatcacccttttcaaagcaagatttccaacatccattgaagatttccttcatctcacggcgacgcctctggatatctccgctgcgtattgccttgaaccccggtaaaaggcccggatttttgaccatataagccatcagctcctctgggtctcctccgatattgaagaactctagaccgctatcgagaacaaactgccgaaaagctaaatgtgtggccaatctgactcgatgaccgtgtgctttcagttctctccctagtgccacaaatggttgaatatcgcctcgagaaccaatcacttggatgacgaggtttaaatgcagtgggaaatgctcatcattcgtgtagggccgttccgcgctgacagcgcattcggaatctcgctcagaatgtatatccgcgcgttggatgtgcttcaatagccctccgaggtgcgctttatgctgatcgatatggatatccactcggccgtcacctacaacaaaatgtgatcccgttagtgcaaagtcagtgattctcgccggaacattttttacctagaatacgggcgttcaacccatcctcgaaaaattgcactccatcggggtcatctgatgctcgcttagtatcttcactcgaccaaccacccgagcgattgatgtccattctctcgagtgatatttctgcaggatttggtgctagtacagttgccatgatcgacaggggtatggcgcgtgggatggttagaggaataattgtgagattgacgatcaggaaaagcgatggtcaagacgaggcaagacaaaaagtccaacacgtggcgaggtctccttggactctcgcactctcgccttctcgtaactctgacaaatccaagttcaaaatgccattcatgttatgttttggtggttaatgacgtctgtagactgcttacgcccaaggtatgtgaaactttagctttatgtgaacgatcgctgggtctagatcaccttgctcgtcagtcaatgcctaggtcattctcggtcggattatatttactggtaacaagtagaccgcggcacggtttacggcagtctgcagccgccagtgcgccagtagatattttgcccaactcctctgagccaggggagaggtatcctagaagcgtttactcgattcagtggagatggaatctgataaaaaaaaaaccaccagaatctgatggaaattactaggttgctgatacacgaaaatggatgcttcccttttttatgaatgttccttcctaataatatccccccgctcgaaagcggtcgcccggaggcctccttctccttctgccagcattatccgtatttcccatatcccctcccacaacgataatgaaacaatatcgttatcgtactatatgccgcagcctaggctcaatatgacggctgattttgtttccgctgagtatcttccactatatgcgattgcatagagccaggaggtgagattgcagaaactcttgaacggcgatagaaggggactgaggaggcgttggatgactcgtgcagtttgactgggatctagggatgaagcccgaatcatccaaccagggctttctcttgaatttacagcgaacgaggacggaactatattcaaagtcttcggccaagggcatctgccgctcgcgccagaatccggagctacgttgcagcggagccagatttggcccccgtttccggctgggatgaagacactaccatcaactgcctatgaaggtttagtgtgtaaaacaatgttcccctcctcttcttccgcaagcttcgtatacgcccgtcttacatagaacacaaaaggctgctttgatgctgtaaatcatagattggaagatagtccaaatacctaaaacttcaatatgacatcgttaaaggacaatgtcaattatgtaaccatcccgttaaactctggaaagggcctcagaagtaacaaaaagctaactcaatgatcaatcaagaagaacgtatgaaaaacaggtaagacagtaagtgccaatatttcgacttgcagagaaataaatcgggatattgatgccataagacctaatcagctccagaaaggctcctgcaaaatcttgaccatggcaatgttttttctcttgtcttcttccttcttccgatttaacttgttcagcctgtacggggtgatagtggcgggaaattcctaaatcatagattggaagatagtccaaatacctaaaacttcaatatgacatcgttaaaggacaatgtcaattatgtaaccatcccgttaaactctggaaagggcctcagaagtaacaaaaagctaactcaatgatcaatcaagaagaacgtatgaaaaacaggtaagacagtaagtgccaatatttcgacttgcagagaaataaatcgggatattgatgccataagacctaatcagctccaaaaaggctcctgcaaaatcttgaccatggcaatgttttttctcttgtcttcttccttcttccgatttaacttgttcagcctgtacggggtgatagtggcggtaacttcacaccctaggtgagcatcctatgcaccgagggcgtgagtcccactcatcctgggtgagcttacttattctaggtcgcgttagcatattaaatttatatagagttttctaattacggatttctatatcgattctaatataagttgtggcacctatatacatctatcacgggtaggaggttacttattgaacgaccttaagaagatttgttaaagcttaatatacttcgagccggcttttaaagccatttttctagagggaagactcggtaatgaatacggacgaagcaattggctagataatagaattttgtacaccaaaatttatcccgaaagtagagcattaccgttattaggcgagtttcgactataagggagctagtactactcttgaaccctaattataataagatgtttagttagaactttctctatctgctaaacaatccctataaaataatcgagttccgacgcggagcggcgagtactttagtgtaagacgtctttatttatatagagattgcgatgtcctttctcgaagcctaggtccgactaggagatgtggaacgtcttaagagtgtgcccgccactattggcggtctttagtgattcatccaagctgcgaagctgccagacggcattactagattatttgactcccggtatcttaagttattcttcgtagggaagaatcaaagtgcattccgtgagccaaaaccgcttggtaatctttcaccaatttttcacatccaggctaataaggtttcatcgctgcttcaaggggaaaggcatattgaatgattgattgattagatgtgtgtggcttgagtacggctgagcggacggggagccctattttccacaccctatggtcgtatgtgttaggtcagtcacgtgttagatatcattatagaatgaaatcaatttagggaattggcgagaagaaatttaagcaggtggggtccacgattacggagtactctaaaccattatgtgatttaataatgaataggattgaggaccaaccgctctctttttagctgcaagaatgcacgaccaagtagtataagtgggttcatgcggggcggccacaattatacgactcactcagctccaatcccagtcgactagggtacaggcccaagctccaaatcttcataaccgctagtgttcctccgtggctccctagcgacaacatatgatgtcccaaagggtaccccaaatgccgcccatgaacagcgcggtgcccaagcccatccgctgtggtctaggaattccccagcatgagacggaacgtgataccatcgaatcgcaaaccaggcgaagaaaataccaataagacttccgcccataatgtcccagccagcgtgcatataatctgcatacctagtcgcgcagatgtagagggctacgcctataggagatagaacgagtagaagaaggtataggggcggagcggttgcggacgagcgagtggggatggggtcgtgtgtagtctgcgcgaggctgttatttcgatcccgctgtcctatttggggagtgagacgaaatggcataggaaagcgaacggcaaacttgatgctgagccagagggtgaggtagagaagcccggcccacgagaacgatgagtggccggatggaaaggcggcgaacccatccttcacaatactagcatcggtgtttcgacatatgctgctggtgaccatgataggggctgatgcctgcttgagaccaaggcccccaacaatgtagtcggcaacgtttgagagatcagggtcgcagcgggcaaggaagtccggtcggggcttccctacgacatcctttaggccagatgtcacgaagaaggcacctgctaaactaaggccaagtcctagccatcctgcatgccattcccatagtcgacgtctccacacgctccctccgtcaccgtggctcgatgttttgatggccgatgaagggatcaggagagatagtgctaggattgtgatggcaggcgcaccgcaagcgacgattgcaacgacggtgatgctgacagtatcggaaaggaggggatatgatatttggggatcttcgagagagaacgcatggcgataacccgtgatcttgtacaacacaccacctacagcggcaacaaggcttcatatttcaattagtaagggacggaggagtcctatgggaataatcgaacgaacatgatgatggcccaatcgagcacgtaagaaaatatcaactgaatagaggatctctctcctgaaaggagcctactatccagatttcctggattatatgccatgggtagagatttgagcgggtagtaaaagtcacgagagcaaaaggcgaggtaggaaaagaacacgatatgaattagcttgaaaaactattggctggattactggcgcctttgacatttacaaatagacctgctagtttcagatccaatctaggccgcggtttgcggaaataaagaaagccgagggcattcctttgggagcgtacagcccaggccccacttagggcatacaggtccatttgctatggaccttctaataccgggaacattaccatatatcgtagatactgtagaagcacgtgcgcagtttccggtccataaaagttggtaactggactgacttggacgacaggatttatactatttacatgcatcatgctctgtccgttgatccaagtctgtttttgttactttccattccacggagttgcctttcaaacggcatgcaatgagttataatgcaaccgaattcttctttaggggagctaggtcactagttagtagcgtacccgatgatgctaacaagaaaataaccaaataagcctggtttcataccttccgtacccgccactggggacgaattggtcactctgaatggctttgcaaccctccattctgagttgcctccgaaggcatcaaaatggcaatcctgctgccactttgaattgagtttctggataccgggttgaaaggccgctgtcaatccagccattcacttgtctgtgcgcacggtactcttcttccaggtcgtggatatgtactttcaatagatagcgcggaaatacaattactaatacgataaccatggcaatgcggattctatagttcatggtcatgatagaagcggttggtgatgtgaaggctttcgggtacactttcattgataaatatgtcgacagataaaaacgaacgatatatggtggtggtgttgcccaataggaatccagacaataccagggctttatccagataactcaatgttgccaacttccgacttccaatccaaatttacaacaattcattcttggcacgaaagctgggtttgtaccgtacattgtatgtgttccgtcaccggtcaagcaattccacaaaagcaggtagagataaaagatatcggatttaatcttgcagcgaatataggcagaaaataacaaacctctaatcaaatcccatagggccaatgggagggttaaatgaaggcacgtgatactgactgtcgatctatagacgagggaataggcgtggcagtttctttgggaataaccttatcatcgctatcattccctgcaaagcactgtacacatgaccatattgtcgagagatcccactatgaggcttggcggtaaacaaaaagaataaaagaagaacatagtgcatggaccatgtctccacaccgcactggcccaaatgggttaagggggttaattttaattgatgaccctgcaggtaaccccaaatagaacagaagaatgtcactcgcgccacgctattcgtcacaggtaataatatccatctgcctggcgctctcggcaactctcgccccgtcagggttcagcctaggcaaacccagaatctccacctagtagccgataaaccctttgacagaaaatcgtggtacggcgagtgtattggtcacattcaatggcagtaaaatctctaactaaaatcaacagggtccgaaattgacaatttgcccaggtggtacgacacgattagtaagcaaaatgcagataactacaacatacaagtcacaagcggtctgtaaaaagacaggtaaagtaaggtaccaatcgtgattcttgacaacctggtttctatggcgccggtatggagtcaaacaattctgctgcctaaccaagtgccgtgggagatctgtattggttagaagagggcgcatttggattgccagaaacggcacattgcaagtgagcacggcccaattgtttggtttatcttttttatctattaccaacttgctctgagacacggatcggatttctatcatggatatgcttctggtggcacgagctggtattgtttgttgttaagaagaagcctgcagctgatacgtaacccgccagacggaggtgagaaccgtatcgcatgctggctttgcgacaaggggtgagcgtggaacatcagcgaggaagaagcgacacgatctcaatgaagatttagagagtctgagggggccgtgaaaatggggagacgcgtacttgtctagatcagactcctgaggcagtaggcgaggtatcccagtctgttgaacgtcttatcttgggatcagagcactggcgcatgggctagcgaagcaggctagctttttgtttttcgttgcttgttccagtcatattccatactgcggccgatttttcggtttgatcccgcttgcttcggggtcaatgaaacgttatatattgcacaggcgagcggcgcagtccgaaacacgtaggaaatgcaatataaaccgaaaagcaataagctagcaggaaaactctgtatagcctaccgttgttgaaatatcaagttgtgatttatctcatttactagtgtttcggactctgccactcgcatgtgaaatacggtagattatgcgtctgggtgttctctgaaagttcttcctagcccctttctgtattccaagtgtagatcaacgatctgcatgtactgagtagactggacggagctagaccagtacagtatcagccgtttccaaaattcccagacactacggagtacttctttcccaagcacggaataaatccgcaccttatccgagaaaccatcgatactccatcgatagcaaagtttcgtacgggaaatttaggtgcctagcaccgcttgggtgggtgatgcagggacacagacccaaaagaagaacaagcagcgactaaaaaagcttggcctagtagccaatcagctaataatcttcgcggtggcttttcatcctgcttcccacttttcgagtgttctgatagtccacaatcaattcgggcgtcgtaagctcttcatctaccagcaatggacttcggcgaggactcggcaacacggcctctggacggattaactctcccttgtgtggatcgcggccaggtgaagccggacttcggttcccatagatctattgttgcagtgaattttcatgatgtggtactttttttcctatctctcagcggtacttgagaatctgcccctgttggtgggagcaaggatctttttctagcgctattttctggttatcagtcctttccctcattaggctttgcgttgccaaatgtgccccgacttctcaagctcaagagctctattcaaaatgtttcaattattcacaaggtttaagcatcctaacactgagagagtcaaaaaaggcgttgcagcgccgccactccactacgccaaagtcagtcgacacggaagatgctttcgaagcagagttggcaggcaatgttccgttgagtgttcttggggggactcagtttgaggcagagccggactatcttgtcaacaaccaggaggtcgttcacgcaatcatcttacccaattatgaagaaaattttgataccttatggaccacgctccatgttctagccagtcaccctagagctgccagtcagtatgaggtgagttccgttctagtcgttcatttcttcatgaaggagctatattgaccgatgattgttccaaactagatctaccttgcaatggaacaaaaggagctcgaggcccctgcaaaagcggtcagtctagtttcaacttttgaaaccagattttctcacattgaagccacgttccatccgtctggagtaccaggcgagatagccgggaagagttccaacgtcgcatacgccgctcaacgtatcatcaattcacacagaagagacgacagggaggatttgaccaataaattaatcactgttattgatggtgtgtcgagatatatccatctcctattaagacttcaccatgctgataacccttacgggtagccgatacccatctattgcaggattacttcaatgagatccaacgacttcacttcgacgatattgccagccccgaactatccttctatacttgtcccatcatcttcgatcgaaactcatccgaaacaccgattctagtccgctgtgcagatatgatgtgggcattcgcaggtgtctcagccatgtaccctggatccccgatctccattcccacctccgtatatacccttcctctcagcatggcagaacgagttgggggatgggacagtgatgctggggcaattggtgaagacatgcatatgcttctcaagtgctactttgccatggatggcaacatcaccacacgtgttgtcgcaagccccgtgagccaatgtaatatatccagcaatgagcatcgtggctggcgccagaacatggatattttggcagctcgctatcgtcaagctttgcgccatatgtggggtgcactggatacgggatttttcattcggcagagtgctgccaacctgtcgcgtcccagctggcgaatccttttcagcgggacgcaatgggcccttgcacatcttctcttcgaggcgcacttccttccatgtcatttgataattacgttggctatatcatctatttattccgctttcatttccccggagtctatgcatccggatttggagtggacatttcaattcactggcgttctgcgggtttgttcctttattatgatgaacatctgcatgatagtctatggacattggcataatttctgcgtcaatacccgtcttacggacatgatggatgccggtgtccctgatgcgggcttttcattccgaaatgagtggaatggcggtactcttctcgagcgtatcctttttcccgtggcgggaacattgttcgggcctgtcccggccatccaagctgtcttttctcatttctggactgatagattggtatataaagtaagccaaaagccaagcttcggtccaagctctgtctaaaagatatatcttctcttgcaggctgagacttgggtttccatgtggcgatgagaaatggtcttcagttcactccagttctggcttttggtctggtattacactcattttaagatagtgtgcacaggaattttatagattttctttctgtatctctactgattgaatacaatttcttgggttgctgctcaagtcagtagatagcctcgtctcttcctctcttcttctcctatctgtccgcgatcatcgtacagaatatcacccacagtttctctttgcatctaaattctgtagatctagacatgtgcactttttcatgcccgtgattgctcccctgggtctttggcgctgattgaactgattcatctaaccttccaatgagcaggtcttgttttcaatacgaaatcgactgtggcaagtaagcttggtggggaagatgatgatattatgaaccccttgttgggggtgctaactagctaactatgactaagctgtgacannnnnnnnnnnnnnnnnnnnnnnnnnnnnnnnnnnnnnnnnnnnnnnnnnnnnnnnnnnnnnnnnnnnnnnnnnnnnnnnnnnnnnnnnnnnnnnnnnnnnnnnnnnnnnnnnnnnnnnnnnnnnnnnnnnnnnnnnnnnnnnnnnnnnnnnnnnnnnnnnnnnnnnnnnnnnnnnnnnnnnnnnnnnnnnnnnnnnnnnnnnnnnnnnnnnnnnnnnnnnnnnnnnnnnnnnnnnnnnnnnnnnnnnnnnnnnnnnnnnnnnnnnnnnnnnnnnnnnnnnnnnnnnnnnnnnnnnnnnnnnnnnnnnnnnnnnnnnnnnnnnnnnnnnnnnnnnnnnnnnnnnnnnnnnnnnnnnnnnnnnnnnnnnnnnnnnnnnnnnnnnnnnnnnnnnnnnnnnnnnnnnnnnnnnnnnnnnnnnnnnnnnnnnnnnnnnnnnnnnnnnnnnnnnnnnnnnnnnnnnnnnnnnnnnnnnnnnnnnnnnnnnnnnnnnnnnnnnnnnnnnnnnnnnnnnnnnnnnnnnnnnnnnnnnnnnnnnnnnnnnnnnnnnnnnnnnnnnnnnnnnnnnnnnnnnnnnnnnnnnnnnnnnnnnnaacgcccggggtcgtacggtggcccctcggtggccgcttcgagaggagcttcgcagtggttgccacgttcttcatcgcctagcagtaacgggctccctggttgggcttggtcgtcaggagcagcgctttgttgaagttggcaggggcggtggaacaggttttcccagcgtctgatggctcggcgctgaatatccgggaaactgctgagcgtgttcgagattgtcataagggtgccagcggcaacggcttcggtcttctcggtcagagcggcctcttggagttacagctggcgatatctagccatgtgttcgcgtaacctttttaaatcctcgatctctggctgtacccggtccatatgctccattatgcctttgtagggaaggatgaaatcgcggaggatcttttcctcggtatcagctcggcacagttggctttgcacggctggcaattggctctgaggttcaggaatgtccggtgaagagaacggagcggaagagctgacgctgatcgcgtcgccaggttggaaacccgagagagatcctctcggaagaaaaaaaactctggatgaaaccaggacgtgctaccataaatgtggcaagtaagcttggtggggaagatgatgatattatgaaccccttgttgggggtgctaactagctaactatgactaagctgtgacaatatgccgggtctcaaaaaatctcggcctccggctgagaaaaaaaggaaatttcaataaaaaataagaataaaaaatgataagaaaacgaaaaacgccgtcagttgtcgcaggcccggggcggagtatagatgtccgagggcgtgaattcacgcccggggtcgtacggtggcccctcggtggccacttcgagaggagcttcgcagtggttgccacgttctttatcgcctagtagtaacgggctctctagttgggcttggttgttaggagcagcgctttattaaagttggcaggggcggtggaacaggttttcccagcgtctgatggctcggcgctgaatatccgggaaactgctgagcgtgttcgagattgtcataagggtgccagcggcaacggcttcggtcttctcggtcagagcggcctcttggagttacagctggcgatatctagccatgtgttcgcgtaacctttttaaatcctcgatctctggctgtacccggtccatatgctccattatgcctttatagggaaggatgaaatcgcggaggatcttttcctcggtatcagctcggcacagttggctttgcacggctggcaattggctctgaggtttaggaatgtccggtaaagagaacggagcggaagagctgacgctgatcgtgtcgccaggttggtcctgcgtggtgggctggtattcttgctgagtaccgtgactagactaagttggacgatttgtattctggtatgagcgttgaactgggtctatgatctttatctttttcaggtccatttgggagaaagtaaaagacagtacttcagccgagcataaaggagaccacgtggagaattcccagaaaaaaccataggagggtcttagtccttgtaggagtatagcgacgtggtagtgattgtctgagccgatgtccagtatctttgagttcgtttcagctttctagagtatggtatactgaccgtggtggttatgtaattggtataccacagaacgggggtacggaaatttggcttgttctttagcgtggtgggcttggaataccgctgctgggtcagtaactgtatcctctgcgaaaggataacctaggacgataggtccgattgtgaaaactgggttttcgattttaagctttaaatctgccttcgggactattaggtagctgtattttgcggttgcacgaaggctaacgaatgtatagtaacgtttccagattggcgtgtatgggagaccatagaagtcgatttatgggccggggtcctgtggtatcctactagcatgtggtttaccgttggtgtcccagacggtacggaactcggcgcgctttttctgagatagttcctttatcgctgtataaataagctcgttgcttagtagaacgttgcggtcgttaggtagtactagccttccttttgggtcgcgcttgtatctcatatataagggcaaccgagcgatatcttgtggagatagtctactgcctgtgataactgggacccagtcactggtctagattggcctatccagttctagtttagtacgagcggtatcacgagattgtgtcatgtaggaatcgtcgaatgcgtatcccggaaggcaaagtatatcagtcgctccctgtgatggaccaaggtacgggagtgcctttctttttggtataatgagtctggtgtgtaagaaagagaatggttaatgtgaaaaaagaagtaatggaggtaggaaaaatggaacaggtacgttaagcagcaagtaatagttgaatgagagttagaaactcaaattggagtaaaagtaggagttggaagtaagagtcaagtgatgtgaggtagtgagaatggatagtaataaaagtaaaaggaaagtaaaaataaagcgaggaaaatgtggtacttaggagctcgctgggggtacgccctgacgctcctcgaagtctttgatagccttgttacatccgatgcagtcctcttcccgcacctaatagtcgtccctagctgattggcctttctagcggattagatacttagtgatttgatgcctagtactgttgtgacggggtcgaccaggcgcgttgacgacgcgcttggtaagaatgcggtcgacctcgtagacgatatctttggggaaacgctcgtctgtagtcgggtggtgttcgtcatctggttggcgctcccaggggtcgtcaccgtctggggcgggttctaggtatatgatactgatgactgggtggattcttgactcagttggaatatttaaacgataagcaagcttcctgacgcgttcgagtacttcgaaacgcccgatgtaacgctgtcgtagtcgccttggtaaaacttggttcaacggtgtgtcgtatccgtgtcccagcttaagatagactttgtcaccgatattgaaaaaaatctgcctgtgatagcggttgtattggcgttttatacgcatggcagcctaagcggcagaatgctcggcatctgtacgcgcggcgatgtcgggagctgtggcttggtgtaaaagcgactaagggtggcgtagttcgatactgtataagagtttgtaaggtgagtgacctgtcgttatactgactgagctgtttagcgcagcttggagggcgggtaataggtttggctaatcttcgtcggggtgagtggcgattgtgtgccgtatagtaacttcggctgtctggttagtatgttctgactgactgtcagtttgtgggtgataggtggtagtaaaaaacaacttggtgtagatgaggtcgaaaagtgctttccagaggccctgtgtgaacttagggttgcgatcgctgataatcactgtaggaatcccctaattggctgtctaccagaaagagagagtacccagcgcctaatcttcactgtcccagtctatacagccaggtattattcccatcaacttggtgaacttgtcggtcatagtcatggctgtgttatatctgtcggtcgaaatgggtatcgcgacgattagatctaaagtaatagtgtgaaagggtatcggcagggcgatgatcggttggagagaaccgtacgggcgataacggcggatcctgtactctaaatagatagggtaatgtttaatgtactgctttaggagcttggcgcctttgtagaatgtgataccgcgaagcttatgctaagctctgtcgaaaccctggtacatctgctcgtcatgaaccaagttgaaaatttcctgagtcatggattggggcagatacagactctcctcactgttagaatttgtgaaaatgatcaagctattttctaggtggtagggtaacttcttaacttggggatcctgttgggcgtcaacgctttctagagtgtcgattagggctgaccagcgagtgtctgactggtatcctcgtaagatgcgatccttagtgtcgtcgcttagctggagcaccgatgctgtaaggaggtacgctgtgggttggtctactgtaggttgtttaaatatatacggcgctgggatatcctcgagattgtcttgtgtgccggggactgacgggtccgtatatagtaggcgggaaagagtgtcagcgatcttattagtttttcctggtctatggaagatgtgtaggcgaaactgttagatgaactgggacgcacggactaggtgaagattttagcgttctaaagaaatagaactcaagtttgttgttttagcaatacctatagtgctactatggtcggtgtataccacagccggaaggttgctaggacaggcctctaccaagtggcgtaccttgcggagggtctagtagagggcggaaacctcgagcttagtgggctagtaattcttctctgcgtctataagaagtcggctgaggaatatgatcggctggatctctgtagcagggggtggttttgaaatgtccttatgagtgaacgttgtctttgtatgatagattgtggcactgtgccctgtttcctttgaaccgtcggtatcgatatagagctggtgtgtgggatcatggtgtgctagccatttaggttcgtggaactcggcctggagtagacgaaaactcttgagctcagcttgggagggtttattgagaatggcttgtgcgctctacgctcggcgctgggggcctttgatcgggctccctttcagtaagtttgtcttgtggacttggagtggttccgatttctgtgtgtagcttttgatataatggcgaagatcacccgtcattctaaggtatgtttctagctgcttacatgtgcgcggaaaaaccagtgaggttattgcctttaccttctcggcggttgttaacatgcctacggagttaatgtccttgcctagtagggtcaaacttggaaacctaatacgcgctttcttcgggtccagagtgatattgaattcgtctagttttgcgaatagtaggtggagtttagcaatatgttcgttaagtgtatcgccgaccgcgaagatattatcgatgtaggttcgacactattctcgaaacgcgcggagtatattgtctatctagcgttgtatataggcgatggagtttgaattgcctatggtaacgacgtggagaacttcttaactgtggtgcgatatgacagcttagtggctataatagtcggggtggatgtgctattgatagaagaattttgccgtgtctacgattgtgatgaaacgcttgccttttgctaaagcaataatctcgtcttgtcctggcaatgggtataggtctggaactaagttcttatttgtcgggcggttgtcgaccatggcgcgaccgacccgttggagcttggcgttacctttgtcgtctatacgagtgacccatttctatataataaaaatagggttcacgccctaggcttggtatttagtaaacgatatctttccttaagcatatagagtatcgaatgtattgtcgatgacttgttggctttctctcgcctatctgtagacttgtgaacgctgtggctttgaaccagggactattgggagtcttatccattcgtcttataggatatctataacactggggttagaccaaatattatattgcttataaatatcgcggagtactgcagctgttttaggcgtcccatagattataatactattaggtagtactgtttctagtggatgtcccggccgagcgtaggctgtagatattggcaggaccttctgtatgtccggtgtgaaaatagtatcaggaagtctattaggaagtctatctggcagccggggcaagttgttaatagcggccagataggcagtgacagagtcgtgaacgtctcgattaatcaatggggggcggggctcgaccgcttggggctgcgatgccagaggcgttacttcggtagaaacttggtaggcggatgtgaagtctggctctaaaagttggcttatacgatccttcttcctaatgacttgtgttcggtcggtgttgttaacggcgtgtatatatgtgaaaccggcgtcaaccatctgtgccggaatcttaaacttgctgttgcctggcttgaaaacgaagtcacgatccttcggtaaaatcgacttcacgataatggggatctgtgccgcctggcgtggggggacctcgattttagaagaagtgtagaccggtcttttactcatgtggtgtggttttgcgcagagggcaataggaaaagtcaagttttcgcaggacttaatgatcgcctgggaacgtgggaaatcgagtataaacccttctggtcctagaacatccataccgataagaagctgggcacagaggtccttgacgatgtgggcctcgattcgtagctctgcggctatatctttgttcaggaagtaaacttgaatcacgatgtagcggtcggataggtgttgggaaccgatcctacttataggaatcgggctgatagggtactgggggtattggagtgatgccgctagctttgaatcgattaaagtcataacacatccggagtcgaggcagcaagtgtttagcttgctggggcttccaagtccgactgtggccgttgtatatcgccaggatcgaaatgtatagccggggacgtggtcggtctgtctggccgagtggatgatgcgataagcgggattcgcgaaattagcgatagctttagctggtatagcggcagcagcttgaggcttacagccgttaagatgctgatacagcttggtgttcgacttgaaaacctgtaaataggataaataagtgactgagtactcgctgtcgactgtatatagctgggcctatgccggcggatcggcctgggcttgaaaaccggattggtggtcgttatcctgtaggccggtagggtcagcgaaattcgcaccgtatgggtccttgtcggtgtaaaagtcgtcctcgaaatcctgttaatcgttgtcgttaactaggacgtcgtcctgatactcctccaggctattgttattagcttgggagtagtcatttgactgatgatagtcagtatctgtatccatgtggtatgcccgctgaggtttattccaaacagtacgctgggagttcccagagccgttacggccggactattggcggccaggattgttccaggtctgctgagcttgaactccctgctatagacgttgttgtctctgaaaggtttgggggccttggttgctttgtgctgggttctggggctgatactgatgggactgatattgggctcctgtggcttggtatgggcgctgaggagtctgctgagcctggccacggggcgctggagcctgttgttgtctatatccggcctggctttggggtagaccttgatagtcttgggctggcgagcggttgtagccgtacgggcgctgagggtagccttggcgctggtcttgtcggtgatatggggccgaattgtcctgtcgcggcctattgtttctaaacctggtagtcaactgactctggcgcttggttgccatatctttctagtcttgatagtggtggtcaaggctgttcatgaaagtgactaacgaggtagtctcagttggctctgggatgtcgcgacgaagcgtaggctctaggttctggcgaattcgtaataactggtcgagaacatctgtcgtacccgtagctttgcataggcgtaacataccctgcgcatattctcttggggtgcggcctcggcgtacgtcatcccattcgtatgtgtgcttgtcaagctggagaagggcctcggtacggttgggtctgaaacgccgcgtcatcatggaaaaccatccatcctggagcggaacctggttcataaggcgtttttcgtccgtggtcagctcctgcgaataccatcggagcgcgtcacctcgtaggcagctatggatgttcgctcggacaacagcttccgacttcaggagtattaggtctgtcatacgatctacaaacgtatgcacgtcggagtagacgcaaagattttggactgtgtccattccatccttaaaactcttcgaaggatcgaaaacgccaatttcggacgctttccacgaggtatcggtagtagccaattggcctggggaaccttgctcgccctggggaccttggttaccttgaggcccgcgaagagcgttggcattgttccgaaggcttgtctgtacggctttctcgataagctccgtaaactgtgccatatcgaaaccgggcaacggtggggaagcagccggagttggcgtgtcgcctgtgtggccaggnnnnnnnnnnnnnnnnnnnnnnnnnnnnnnnnnnnnnnnnnnnnnnnnnnnnnnnnnnnnnnnnnnnnnnnnnnnnnnnnnnnnnnnnnnnnnnnnnnnnnnnnnnnnnnnnnnnnnnnnnnnnnnnnnnnnnnnnnnnnnnnnnnnnnnnnnnnnnnnnnnnnnnnnnnnnnnnnnnnnnnnnnnnnnnnnnnnnnnnnnnnnnnnnnnnnnnnnnnnnnnnnnnnnnnnnnnnnnnnnnnnnnnnnnnnnnnnnnnnnnnnnnnnnnnnnnnnnnnnnnnnnnnnnnnnnnnnnnnnnnnnnnnnnnnnnnnnnnnnnnnnnnnnnnnnnnnnnnnnnnnnnnnnnnnnnnnnnnnnnnnnnnnnnnnnnnnnnnnnnnnnnnnnnnnnnnnnnnnnnnnnnnnnnnnnnnnnnnnnnnnnnnnnnnnnnnnnnnnnnnnnnnnnnnnnnnnnnnnnnnnnnnnnnnnnnnnnnnnnnnnnnnnnnnnnnnnnnnnnnnnnnnnnnnnnnnnnnnnnnnnnnnnnnnnnnnnnnnnnnnnnnnnnnnnnnnnnnnnnnnnnnnnnnnnnnnnnnnnnnnnnnnnnnnnnnnnnnnnnnnnnnnnnnnnnnnnnnnnnnnnnnnnnnnnnnnnnnnnnnnnnnnnnnnnnnnnnnnnnnnnnnnnnnnnnnnnnnnnnnnnnnnnnnnnnnnnnnnnnnnnnnnnnnnnnnnnnnnnnnnnnnnnnnnnnnnnnnnnnnnnnnnnnnnnnnnnnnnnnnnnnnnnnnnnnnnnnnnnnnnnnnnnnnnnnnnnnnnnnnnnnnnnnnnnnnnnnnnnnnnnnnnnnnnnnnnnnnnnnnnnnnnnnnnnnnnnnnnnnnnnnnnnnnnnnnnnnnnnnnnnnnnnnnnnnnnnnnnnnnnnnnnnnnnnnnnnnnnnnnnnnnnnnnnnnnnnnnnnnnnnnnnnnnnnnnnnnnnnnnnnnnnnnnnnnnnnnnnnnnnnnnnnnnnnnnnnnnnnnnnnnnnnnnnnnnnnnnnnnnnnnnnnnnnnnnnnnnnnnnnnnnnnnnnnnnnnnnnnnnnnnnnnnnnnnnnnnnnnnnnnnnnnnnnnnnnnnnnnnnnnnnnnnnnnnnnnnnnnnnnnnnnnnnnnnnnnnnnnnnnnnnnnnnnnnnnnnnnnnnnnnnnnnnnnnnnnnnnnnnnnnnnnnnnnnnnnnnnnnnnnnnnnnnnnnnnnnnnnnnnnnnnnnnnnnnnnnnnnnnnnnnnnnnnnnnnnnnnnnnnnnnnnnnnnnnnnnnnnnnnnnnnnnnnnnnnnnnnnnnnnnnnnnnnnnnnnnnnnnnnnnnnnnnnnnnnnnnnnnnnnnnnnnnnnnnnnnnnnnnnnnnnnnnnnnnnnnnnnnnnnnnnnnnnnnnnnnnnnnnnnnnnnnnnnnnnnnnnnnnnnnnnnnnnnnnnnnnnnnnnnnnnnnnnnnnnnnnnnnnnnnnnnnnnnnnnnnnnnnnnnnnnnnnnnnnnnnnnnnnnnnnnnnnnnnnnnnnnnnnnnnnnnnnnnnnnnnnnnnnnnnnnnnnnnnnnnnnnnnnnnnnnnnnnnnnnnnnnnnnnnnnnnnnnnnnnnnnnnnnnnnnnnnnnnnnnnnnnnnnnnnnnnnnnnnnnnnnnnnnnnnnnnnnnnnnnnnnnnnnnnnnnnnnnnnnnnnnnnnnnnnnnnnnnnnnnnnnnnnnnnnnnnnnnnnnnnnnnnnnnnnnnnnnnnnnnnnnnnnnnnnnnnnnnnnnnnnnnnnnnnnnnnnnnnnnnnnnnnnnnnnnnnnnnnnnnnnnnnnnnnnnnnnnnnnnnnnnnnnnnnnnnnnnnnnnnnnnnnnnnnnnnnnnnnnnnnnnnnnnnnnnnnnnnnnnnnnnnnnnnnnnnnnnnnnnnnnnnnnnnnnnnnnnnnnnnnnnnnnnnnnnnnnnnnnnnnnnnnnnnnnnnnnnnnnnnnnnnnnnnnnnnnnnnnnnnnnnnnnnnnnnnnnnnnnnnnnnnnnnnnnnnnnnnnnnnnnnnnnnnnnnnnnnnnnnnnnnnnnnnnnnnnnnnnnnnnnnnnnnnnnnnnnnnnnnnnnnnnnnnnnnnnnnnnnnnnnnnnnnnnnnnnnnnnnnnnnnnnnnnnnnnnnnnnnnnnnnnnnnnnnnnnnnnnnnnnnnnnnnnnnnnnnnnnnnnnnnnnnnnnnnnnnnnnnnnnnnnnnnnnnnnnnnnnnnnnnnnnnnnnnnnnnnnnnnnnnnnnnnnnnnnnnnnnnnnnnnnnnnnnnnnnnnnnnnnnnnnnnnnnnnnnnnnnnnnnnnnnnnnnnnnnnnnnnnnnnnnnnnnnnnnnnnnnnnnnnnnnnnnnnnnnnnnnnnnnnnnnnnnnnnnnnnnnnnnnnnnnnnnnnnnnnnnnnnnnnnnnnnnnnnnnnnnnnnnnnnnnnnnnnnnnnnnnnnnnnnnnnnnnnnnnnnnnnnnnnnnnnnnnnnnnnnnnnnnnnnnnnnnnnnnnnnnnnnnnnnnnnnnnnnnnnnnnnnnnnnnnnnnnnnnnnnnnnnnnnnnnnnnnnnnnnnnnnnnnnnnnnnnnnnnnnnnnnnnnnnnnnnnnnnnnnnnnnnnnnnnnnnnnnnnnnnnnnnnnnnnnnnnnnnnnnnnnnnnnnnnnnnnnnnnnnnnnnnnnnnnnnnnnnnnnnnnnnnnnnnnnnnnnnnnnnnnnnnnnnnnnnnnnnnnnnnnnnnnnnnnnnnnnnnnnnnnnnnnnnnnnnnnnnnnnnnnnnnnnnnnnnnnnnnnnnnnnnnnnnnnnnnnnnnnnnnnnnnnnnnnnnnnnnnnnnnnnnnnnnnnnnnnnnnnnnnnnnnnnnnnnnnnnnnnnnnnnnnnnnnnnnnnnnnnnnnnnnnnnnnnnnnnnnnnnnnnnnnnnnnnnnnnnnnnnnnnnnnnnnnnnnnnnnnnnnnnnnnnnnnnnnnnnnnnnnnnnnnnnnnnnnnnnnnnnnnnnnnnnnnnnnnnnnnnnnnnnnnnnnnnnnnnnnnnnnnnnnnnnnnnnnnnnnnnnnnnnnnnnnnnnnnnnnnnnnnnnnnnnnnnnnnnnnnnnnnnnnnnnnnnnnnnnnnnnnnnnnnnnnnnnnnnnnnnnnnnnnnnnnnnnnnnnnnnnnnnnnnnnnnnnnnnnnnnnnnnnnnnnnnnnnnnnnnnnnnnnnnnnnnnnnnnnnnnnnnnnnnnnnnnnnnnnnnnnnnnnnnnnnnnnnnnnnnnnnnnnnnnnnnnnnnnnnnnnnnnnnnnnnnnnnnnnnnnnnnnnnnnnnnnnnnnnnnnnnnnnnnnnnnnnnnnnnnnnnnnnnnnnnnnnnnnnnnnnnnnnnnnnnnnnnnnnnnnnnnnnnnnnnnnnnnnnnnnnnnnnnnnnnnnnnnnnnnnnnnnnnnnnnnnnnnnnnnnnnnnnnnnnnnnnnnnnnnnnnnnnnnnnnnnnnnnnnnnnnnnnnnnnnnnnnnnnnnnnnnnnnnnnnnnnnnnnnnnnnnnnnnnnnnnnnnnnnnnnnnnnnnnnnnnnnnnnnnnnnnnnnnnnnnnnnnnnnnnnnnnnnnnnnnnnnnnnnnnnnnnnnnnnnnnnnnnnnnnnnnnnnnnnnnnnnnnnnnnnnnnnnnnnnnnnnnnnnnnnnnnnnnnnnnnnnnnnnnnnnnnnnnnnnnnnnnnnnnnnnnnnnnnnnnnnnnnnnnnnnnnnnnnnnnnnnnnnnnnnnnnnnnnnnnnnnnnnnnnnnnnnnnnnnnnnnnnnnnnnnnnnnnnnnnnnnnnnnnnnnnnnnnnnnnnnnnnnnnnnnnnnnnnnnnnnnnnnnnnnnnnnnnnnnnnnnnnnnnnnnnnnnnnnnnnnnnnnnnnnnnnnnnnnnnnnnnnnnnnnnnnnnnnnnnnnnnnnnnnnnnnnnnnnnnnnnnnnnnnnnnnnnnnnnnnnnnnnnnnnnnnnnnnnnnnnnnnnnnnnnnnnnnnnnnnnnnnnnnnnnnnnnnnnnnnnnnnnnnnnnnnnnnnnnnnnnnnnnnnnnnnnnnnnnnnnnnnnnnnnnnnnnnnnnnnnnnnnnnnnnnnnnnnnnnnnnnnnnnnnnnnnnnnnnnnnnnnnnnnnnnnnnnnnnnnnnnnnnnnnnnnnnnnnnnnngctgggagttcccggagccgttacggccggactattggcggccaggattgttccaggtctgctgagcttgaactccctgctatagacgttgttgtctctgaaaggtttgggggccttggttgctttgtgctgggttctggggctgatactgacgggactgatattgggctcctgtggcttggtacgggcgctgaggagtctgctgagcctggccatggggcgctggagcctgttgttgtctatatccggcctggctttggggtagaccttgatagtcttgggctggcgagcggttgtagccgtacgggcgctgagggtagccttggcgctggtcttgtcggtgatatggggccgaattgtcctattgcggcctattgtttctaaacctggtagtcaactgactctagcgcttggttgctatatctttctagtcttgatagtggtggttaaggctgtttatgaaagtgactaacgaggtagtctcagttggctctgggatgttgcgacgaagcgtaggctctaggttctggcgaattcgtaataactggtcgagaatatctgttatacccgtagctttgcataggcgtaacataccctgtgtatattctcttggggtgcggcctcggtgtacgtcatcctattcgtatatgtgcttgttaagctggagaagggcctcggtacggttgggtctaaaacaccgcgttatcatagaaaaccatccatcctggagcggaatctggttcataaggcgtttttcgtctgtggttagctcctgcgaataccatcggagcgcgttacctcgtaggcagctatggatgttcgcttggacaatagcttccgacttcaggagtattaggtctgttatacgatctacaaacgtatgtatgtcggagtagacgcaaagattttggactgtatccattccatccttaaaactcttcgaaggatcgaaaacgctaatttcggatgctttccatgaggtatcggtagtagttaattaacctggggaaccttgctcgccctggggaccttggttaccttgaggcccgcgaagagtgttggcattgttccgaaggcttgtctgtatggctttcttgataagctccgtaaactgtgctatatcgaaaccgggcaacggtggggaagcagccggagttggcgtgttgcctgtgtggctgggaccctgatttccgttgttacggctgggacccggacctctgttatttgccattttttgcgggaggtcagagagtttggcttcccgtagtaggctcgatagacctgctatggggctggcctcgctgttgtaaaaacgtgaagttaatcgtactcttgactgtaccgggggtcgttctggggtcaggtgtttaatgccggccttgtgagagtggaggtctgcttggtcgtcttcggcttgttcggttcccggagactagacttccgcctggtcgtcttctgcttgttagtcttccggagactggacttccgcttggtcgacttcggcttgttgagactggacttccgcttggttgacttcggcttgttggtcttccgaagactggacttctgcttggtcgccccgtagaaggtctgtgtggctgtccttagcctgtggtgcggaattttcgtccttggttcggaaaaacttgctgtcgtaactgtctggccggggactgaaacgaggctgccgttgtatagtagcgggcctgtgcgtgtagcgtatgatagcagtagcttgggcagtcggtcggtccgaaatgggcatcgaagactggggtgtagaaaggtgtatcacagcagcaggttgggcagtcggttggtccgatacagacgtcgaagattgaggtatggaagccggtgaactgggaggcttgctcgtagttcgcttaggtcggggtctcccgagcggacacgtaggctcgctcgacagaggggttataggacttggaacggcgaggtgagatgtcagacggaggaaatccttgacggccttgttgagtatagacctgtcgatgggccaggaaggtggaaatggatcctctgaagatggaaggatgacggaagtggatggcgaggttgagggattggcgggcccggcagggggagggggcggggacgaggctgccgtcgtgtagtagcgggcctgtgcgcgtagcgtatgacagcagtagcttgggcagtcggtcggtccgaaatgggcgtcgaagactggggtgtggaaaggtgtatcacagcagcaggttgggcagtcggttggtccgatacagacgtcgaagattgaggtatggaagccggtgaactgggaggcttgctcgtagttcgcttaggtcggggtctcccgagcggacacgcaggctcgctcgacagaggggttataggacttggaacggcgaggtgagacgtcagacggaggaaatccttgacggccttgttgagtatagacctgtcgatgggccaggaaggtggaaatggatcctctgaagatggaaggatgacggaagtagatggcgaggttgagggattggcgggcccggcaggtgaaggggttaggataatgataacgcgggaaagtgtatctgcgtcgaaatcacctgactaggggcgtgcctcctagcgataattgtcgaactggattgcaagctgggtggcccgacgagtacgcttatccatggattgttatagtagcggctcggcactgtgatcgacagccttaccgtagcggcttggcactgtgatcgacagccttaccgtagcggcttggcactgtgatcgacagcgtggtcgaccgccgatcgtgccaggcttggtgacctctgaccttggcatataggggaacccctgaggtggtcgaacttgttaaaacaaacccgagagagatcctctcggaagaaaaaaaactctggatgaaaccaggacgtgctaccataaatgtggcaagtaagcttggtggggaagatgatgatattatgaaccccttgttgggggtgctaactagctaactatgactaagctgtgacatcgacctcgtcattcaagcccacactcacttctacgagcgcaacgggcccttggacaatgaagtcattgatcctgcaggtttgaataatcccaaatccccttggtatattactagcgccgcccctggccactatgacggattggacagctttgatacccccttgaagccttatgctgtgtatggagaggatactgtctacgaatggagcaagatcaccttccacaactgcactcatatgactcatgaatttgtggggacatacggattagggcgttcagccttgaattagatattctcatgtgtggaccagcactttcggaatgcgtttgtgaattgaaataaatttgccgcttgcgagttgcaaaatatgaacccattagtacgccatggatagatgtaaacaattatgttcaagattaattaatacccttgtaggctagactatatgccgaccccgaaggaggcgttttacctggtccccggccgacgacatgggctgagtgagttaaccgcagccggtaacagtgataccagtctcttcttgttcaaacacccagtgagactacgccaagaagacaaacgagaggaaatgcctagattgctgcaaccagcactttgctatggcaacgtaagagaaaaaaggcacaatggacttggccgcgtggcaggattggattttctgaatcgccattgcttggaaatccagaattctttttttctattttcctttataggcaggggagcaattgtctgtctccatacacctcacctgaataggcaatagactaggtcaggggcctagttcaaaggggattgtgcttggaaataccccggccatgattggctggaagttagccctaactcaggcagaaaacaatgtattaggaatatccagcaagcaaagagagtgtgcaaaaatatgtatatatacgcatattttgtgctattgccttgcgagatgcgacaaattctcttgatcttcacaaagaaataatcactcgtcatggctagcactatcaacatggcaagtgagcatgtggtcgaacaactaaatcaaaaccatgccgccaacgaaaagcatttcgattcaggggaggtcatgcgagacatgattattggtctggctgatggcatgactgtgccgtttgctctgacggctggtctatctaccctaggctcttccaagctggtcatcctcggtggtcttgctgaactcttcagtgggtcgatctcaatgggcttaggggcttatcttgctgctgtaactgatcgagaccattatgcgagcgaggaaaaacgagagcgtgaagaggttgtctccaagccaaatgcagaaaaggaggaaatccatgagattctctccaattacgggatttctcgagaggcaagccagaatgttgtggattgcctgtctgagaaccatgaaaactggatccgggtatgtcagcatcctagataagaatcaatggtgatattggctaacgtcgggacctagttcatgatggactttgagctgaaaatggaggagccgaacgtatccagagcgtggatttcggcagcaacgatggggatctcttatttcatcggtatggatatctgctctgctattctttcctccttccacgacttatctgaggacctgactaacacgcgagtacttgtttctaggcggcctccttcccatgataccctacttcgttatgcacaaggttgtcgacgcattgttcgtatccatcgggatcacaattgtgattctggtcggcttcggcttcatcaaaaattatgttgtgatcaagacgaaacaagcaggactgtacggagcggcacaggccctgttagttggcaccatcgccgctggaaccagttacgggattgtgtatggcatcgatcatagcaacctttatacatagcgtgttgcgcttccccgggtcaaacacagtttgttatctatgggggaaattgcatatggaactttataaatgagggggctactgaaaaaacgcatagttatagcccgcctggaagatttagacatttttgaaaatttggaaatcctatgtgacgaaagacagcatgaacatttctcaaagccactaaggctcttcgatctatcaccatctcaaataaaatatttcatgatttttgcaaagcccggttcttgcattctcacacaatctctatgatcacataccatgcctttcaatttacgttcaaacgctatatgctgatctcatataatgactcttctcatagtgagcaagatttgcacccaagaaccgaacgccctcacaccggtaaatcttcgaagacgctcagaaaccatcagtatattgtagtggtctccgctgagccagtcagacatgatgggcctgaaatctgcatgagatcaactgaaattgatgaaagcactgataaagactcgtggtttttcttccgtattccaattcgccctgaacagcaccgcaataagacctacaccgtgatcaccacagcgatagaattgttgatcaccacagatcacgatgcatattaccaagtgagcctgatatcgccatttcagaattgcaaagaattcgatgatatgtccaatgtcctatgaacaataccaaattttgacttccccattactgcagaacaggaaatttcccaggttctggtcccaaaactcagctccgtgctcatatagagtcttaagggccttttcaagttgagtctccaacgtcttctcgtggacatcagatttagagcgttgacgaagagtgattccatcaatttccgagaggataagcgccggacacacattgaaagaaccttgcccaaaaagagttggaattaaggtccctcgaagcattttcaatctatcgtatgcatgtatctcattccggaactcgtcatcccatccatccttcctttacttgacaatgactgattttagaagaccaagaccaggctggtcaagttacaagcggcataaagtcggacgacagtttttcagcaccgtaaccgaaatcacagttatgggcctgtcatctagatagaccgtctactgctgaatgagcttggtaaagtcttgcattaatgtctagaaatcggatctcacctgagaaggatgcacttcttgaacaatataatccatgacgtgaagggcgaatagtgcaggtgggagaatctaagactagaaaagttagaggaagggagtatgatatggcagagctagaggaagcaagggttccagggagggaagtcaaaaagcaaaaaaaaaaactagacctacatcaggctttgtattgagatatggtaactgtatggatatgtacatgggagacatggagctgatagagtagcatacacctgccattgatcatcttttcagcctcggaaaagatggatatctaactcaaatgtcgatttaaccaattcggttgagatgtttccctaaagcttgctatcttgttgtcagttatactcctcgctccctccatccatggatggtggatgttcgaggtaatgagtcagcaaaattccctcccgccgggcgcactaaccgcttgtggaatgtagcctcaattctttccccaagcctgagagatatagctgggaccatttaattgtggcgaaggcgaagaaaaacacagaatttcatcctaacagatttattgagctgagcgcactggagaaaaagtggcagtgttgcctttgatcgcatttgtcccagcccacccgagaggaaaccgaaaccaactgccagcaacatcaattggactcaaagctggcgcgaatgacattacgaccacaatattcacaagtctgatacaaaaccaatgagtatggatgatcagcgggggtccagaactgcccccttctacgcagtgccatcccgtcgcctcgtcagcgtcgagcaccctgccgtgatccgcaatgtcgacaaggcgatcgagaccttacaaggcgatgccggaataaaaacagtgaggaagcttctccttctggcagaatatagaacgcacactgatattatacagattctcaacccggccacagacggcacactagttaatctggtgttgcggccagaagatgccatggctcgatcggtgcagtcaacgagcatccaatcaaacaatgtcctgctcaaaatcacagtccccaagcggacaggacggaagcgcaagagaggctcgaatgagcctttcgcagacgcaccggagtcagaagcaactgacgcaccccggcgacggaccgctaaggatctcctgcgcagtctgagtgataacccctctaagtaccagattgagccggtcgggagggttgaacgaacacatgtgtttcggggtaatttcactgctctgatttaatcatggcgagtatgctaatatctgatatcaggaatacctgatttcgtttactcgactacggcaagttcatttacgaaccggttccgagaccaaattctcccttttgactgtgagtctgcttgccatgaaacccactcgatatgtgactaacaacccacagtcgacaagatgaagcaatttgacatcgacatggccaaaggcgccgccgagaatgcagatctgatcccgccaccatcattcagccacggagacgtccccttccactacatgtaagagccaccccatcgaaagcaccgagctaagaccaccagtccactaactctccctcccagctatcggcaaaacccgacagtaaaacaagcaattggcagctccggcaaactagaaacggtgaacacgcaaaccgccaataaaatcctaacccacctagtcccctacgacatacccaaagtgccatccgagccgcgcgcggacatgcttccaataagcgcactagacgcaggcatgctccggacaatcgcgacactaaacgccctatacgacaaacagcccgcctggacacgtcgcggactacgcaacaacctaacaaccgacgaagaccgtctgaacctccgccatgcaattccatacgtgggctacatcttccgatccgggccatggcgcgacgcgatcatcaagcttggtctcgatccacgcacttcaccaaaataccgacattaccaaacctttatgttccgacttctagcacgggaagcggaggtcgcgcgagacggaggcggcgggcgacgccacaatgtgccacgaccgagcgaccagcgcatgggcgaggacgaagccgccagcgggccatcgacgggccatatctttaccggcaagcagccgtttgcgcaagacggacggatctggatggtgggcgagatcaaggacgcgcagctgcaggctgagctgtacccttctgatgcggggcctgggttcctgcgcagcgagtgcgatattgtgaccgatgggtggtttgggaatggcacgcttgcgaaggtgaagacagttatgcgacataagatccaggcgttgatggaggggcgggagccggttgatgaagattatacgaagattatgcagctccctgcgcatgcgcggtctgaggctgatttcccgttgttcacgcttgatcccgaggttgcgacgcagaaggagattagtcttgctacggaggttcgggcggttatccggggttcgccggtttggaggaatttgtcggctaatgctgggttgattaggagggagatcggggaggggagggggaaggtcaaggggaagcaggctgtgaaggggaagagtgctgacccggaaccggagccggagcctgagaaggtcgatgaggagagtgaaggtgaagaggaagaaattcagaggagggagatgctggctgctcaggttgcggatgctgctgcggcgagagatgccgatgaagctgattatgacgatgaggcggacggggacggtgatggggacgatagtgatgatatggatgaagacgacgacgagtaaagcggctactaaattactggatgattggctatgtctagaacaaatggtactttatgctcaatattgtaatcaaaataatcattttattcgttgttaaaaccgtaggcagactcggagtatattgtgaagcatcagacacaacatagagagtaactcatcaattaggtaggataaagaaagtcaacccgagtggtcgtaatagtgaagcaaaacaaatgcataattcaagccttataccaaaacacccgatacactgaacaccagtgtccaaaaagcgacgaacaccatgacccttcgtatagttatacggcttgagggttttgagtttttgaaatggtacttagtattatgttactttgccagatcgattcgtaagaaaagagtgcatgttaagatctgagtgtacatcgagtggaatatatagaaacatcaaaccaaccggccttgatatcttggtccacttcgtcggtaaattagtagatattaattcttctctacttattcacaatcatacgagcggctgacgacacaaaaaataacgattctaaattcgtgagtggctgcttggtccgttctatgaccaatggcagccagtatgtagccgccagtcccccttcgttcgtgctcacgtgcatatttatcattgcgcctgctgcagctacgttagctggaaaccaagccagaggctctcaggccgagaataggtggtttcatctcaaattatttctcagtcagagtggatctttgcccttgagatgagccatcaaccgctacaattgtgtatttcctccccttctgtcttgagcacgcccaagaggagtaagcttgtcatgacccattgtattaaacatacgatctattcagtggcagatgaggtccatattggattcctaggatgtatgaagacagattatacacctaatgtactcaaaattccgatccatgcttactgaccccaaaaagtaccggtggagcgatgcctatattttattacaattctatgagagtagacatgaaaatctggcagatcaaggccaagaaatttataaagatctcatgctaacgagaacaaaagaaactcagtaaaaacttgaagccatagttctgcagggctgtaccttgaagaaactcggagcggaacaaccaccaccgatatgactgccaaatgcggactagtctttctttcggggtctctgcgatagcccgcgtcctctgttctgctctcgtgaatatcgcgccgcatacaatccccaactttctccccatctccctcagcctctcctcccctgcggggtaattccattcactcattcgctgtccggacttaattcatttcaatggattaggcagttttgttttcccgaaagagtaaatgacttgatggtttctttcgttttaagttctacagtctccgatcttttcgcatatcgaccgagtccacagagcttccgtgacaccacaacacaacatatgagagctcaattcccccccgggaagactgcgcacactccgctctcctcagccggcctcttggcccggccgtcattgctgtttctttccatttagtcgccagcctgtgagaagggtcagatcaaagcgatggagcgaaacatagatatctacgccagcaagctcggcgacgaaaagctaggtatgttgatgaaatctgcacaactagaactgttgtccccttcctgtgctaactaacccgtcgtctcaatagacgtcaaagtccgagccaatgttgctaccgaattacgagacagcattgagcccctatgttcgggcgcaagctatcccatattcttagcgaagctatggccggtattcaaaactattttgaagggggacccggtcttcttcagcatgtcttacgaccaggtgagattattggcacacgcttgcccctagtgaatgttgcgcataacgagctaacaaccttggtcatctattagaaattacgaaattgtatcctcgaaacattacaccgattaccgatgggatccccggacgtggagccgtacgctgtcgatatggtcgatctattgatggaacttgcgcggatcgaaaacgaagacaatgccgtgctatgtatgaagacaatcatggatttggagaggaatcaggccaaagccaccgcacaccgggtgcaggctttcttggagcttatccaggaaatgttccagaccatggagcaggtggttcgggatactttcgacactcctaaccaggccacaccgtcgggaatgccatcgacgcccaatgcaacagcacagaacttccagtctccgcgacccagctcgcctgctacctcagtatcagatctgggacccgatcagcagtcgagcaatgttctcctcaagggcatgcaatctttcaaggtcctcgcagagtgcccgattattgtcgtttcgatcttccagacacaccgcgcatcggtgccggccaacgtcaagctgtttgtgccgcttatcaaaacgatcttactgcttcaagcgaagccacaggaaaaggcccacgccgaagcagcagcccaaggcacaatatttacgggtgtgtgcaaggaaatcaaaaatcgcgctgcatttggggagttcatcacggctcaggtgaaaacgatgagcttcttggcatatcttttgcgtctttatgcccatcagttacaggactttcttccaacgcttccttctgtcgtcgtccgtctccttcaagattgcccgcgagagaagtccggtgcgaggaaggagttgttggtagctattcgtcacatcatcaactttaactatcgtaagatcttcctcgagaagattgatgagcttttagacgagcgcactcttatcggagatggccttactgtctatgagaccatgagaccattggcttacagcatgttggccgatttaatacaccatgttcgtgagcatctgagtcgcgaccagatacggcgaacggttgaagtctacactaaaaacctccacgacgatttccctggcacaagcttccaaacgatgagtgcaaagcttcttttgaacatggcagagaacatctccagactagaggacaagcgtgaggcgcggtatttcctaattatgattttagatgctattggtgacaagttcgcatcgatgaaccaccagttcaaaaacgctgtcaaagtttcaagggcgtacaaagttttccgacaagagaccgagccttgcgccgagaactaccttgctgagaaggaccagccaccagactgggatgagattgatattttctcggcttctcctatcaagacatctagtccacgcgatcgtggaggtgacccagtttcggacaacatcttcctcttccgaaacctgatcaatgggttgaaaaatatcttccggcaattgaaaaattgcaacccagacgatgttcagattgacccgaacagcgttcccattaactggtcagaagtttcgtacggttacaatgcagaggaagttagtgtgatcaagaagcttttccacgaaggagctcgtgtgttccgctactatggggtggatcagtctccccctgagatgaactacgcatctccgtttgacttccttgctagccagtacactgccccaatgtcgcgcgaagaaaaggagcttcttgaaagtttcggcactgtttttcactgcattgataccgcgaccttccacgaagttttccattccgagatcccgtacttacacgagctcatgtttgaacatggggctctccttcacttgccccagttcttcctggctagcgaggccacttctcccgcattctctggcatggtgctgcagtatctcatggaacgcatcgatgaggttggaacttcagacatgacgaaggcaaagatacttctgaggatgtttaagctttccttcatggccgtgaccttgttctccgtgcagaatgagcaggtcctccacccgcatgtgacgaaaatcgtaaccaagtgcattgagctttcagtcacagccgaggaacctatgaactacttccttcttctgaggtctctctttcgaagcattggtggaggacgattcgagctcctgtacaaagagatcctcccacttctagaaatgcttcttgaaacgttcaacaacctgttacttgctgcccggaagcctcaagaacgggatctgtacgtggaactcaccctcaccgttcctgcgcgactcagccacctcctccctcatctcagctatttaatgcgcccaatcgtggtcgccttgcgtgccgactctgatcttgttggtcagggtttgcgcactcttgaactctgcgtggacaacctcacggcagactaccttgatccgatcatgggcccaataatggacgagctgatgactgcactctgggatcacctgcgcccatctccttacaaccacttccacgcacacaccactatgcgcatcctgggaaaacttggcgggcggaatcggaagttcctcaaccacccgccagaattgtcgttccagcagtattctgatgataacccaagcttcgatatcaggctgatcggtcccaacgagaagcggccttttcctgtagatatcggtattgatctcgctgcggggaaactcatggaggttcctaagacagactccgggaaagcttcagacatttactacaagcagcaggcctaccgcatgctcagctcctatctcaagctccaaatcggttacgacaacatccccgaagacttgacaatcttgatcagactccatgccaatgatctgttcgaaaataagacaggtgctatggcagatattcttgacaagtcggaaagatcggcctctattccaaagaagattgcgcaggaagcaacagtaaagaaacttatcaaggcttgcatctttgccaccactatccccgagctcgaaccagccgcttcagcatttgtggcggatgtgtgcaagcacttcgctcttgtagaggtcggccgtgctctggctcaaatccgacacagtcgcaaagcctttgacgtcgcaaacggggaaggccctgtgtacctcgactctaggattctggctgaagctttagttgagtgtttatcatccgatgaggtccacgtccgagaagcagctgagcaggcaatggtggttgtgaaggatgccgcaggcgtcatcttcggatcgcccgagaaagcagccaagctcccattcttcgtgcatctgggccgcgtcttctgccacagctgctacagtgaagagtggttcaccaaggccggtggcagtctgggaattagcctgctctcaaccaagctggacttgggagatacatggctttatgagcgacatgtcgagttttgtcgtgctttgatgtatgttgtcaaggacacacctgcggatctccctgctgctacgaggcttcagtcacaagaaacaatgactttgatgctgcgaagatgcggcaaactcatccccaaagaagatttgaaaaacgagaagagccgcttgtatgctctgtgtggcttgttcgtgtttgaactcgcacacatgaataaacatgtccgggagactgctcgtcgttgcttcaccacattgaaggaggtccttggatgtgaggtgcatgagcttattttccccgttagagatcgtctcttacagtcgatcttcaacaaacctttgcgtgctctgcctttcccaacacagatcggtttcattgatgccatcacgtactgcctcggccttcacaacgacatcgtcaccttcaacgaaccgctgaaccgcttgatgctggaatctctcgccctcgctgatgccgatgatgaatctctagcatctaagccaaacgaattcaagactgcagatatgattgtgaacctgcgtgttgcttgtcttcgccttctatctatggcaatgagcttctccgagtttgccaataccccgcagaacacgagcagggctcggataatttctgtttttttcaagtcactatactcaaagtcacaagaggtgattgaagccgcaaacgcgggtctccgtgatgttctcacccagaccaacaagcttcctaaggatctgttgcagaacggactgcgccctatcctcatgaacctccaggatcccaagcgcctcagtgttgctggtttggatggtcttgctcgtcttttgacactcctgactaactatttcaaagtcgaaatcggcgcgcgtctgcttgaccatatgaaagtcattgcggatgatgccgtattgcagaaggtgtctttcagcctagttgagcaaaacccagcgatgaaaatagtggctgccatcttcaatattttccatctccttccaccggccgccacttccttcatggaacatcttgtcaacaaggtcttagatctcgaactgaagcttagaagaacgtcgcacagtccattccgcaagccgcttgtgaagtatctcaatcgctaccccaaagagagtctcgcattcttctttgcgcgcttcaaggatgagcggtttggacgattcttcggacaaatcttggcggatcccgagagtgaaggactgcgaaacgcgatcgtcgctgacacggatggcttttccgctgccgcctttggtcaggatactggtgatggcaagaacactgctgctatcaacggagtctatgtcgcacattctctttgttcctacagttcaaccaagcgctggttggtctcacatgcagagatgagaaacaagctcctggcttccggtagagatctggagaggaagcttcgtggtgatagtctgccggctgatgagcgactccgagtggagcaagccgaagaccaattgatggatatctttaccatgtacttggcagaggccacccacgatctggacttcctgtttgaagtgattgacgggctctccgccgatgagttgaaacgcacgcttgcgcttcctaagttcatctataagagcatcatcaccaatgagtccatcgattaccggcgttctgttattatgcgctgtctcgacctctacggccagaagagctgccctcagaagaccaagacttatgcctttcgccacctggtcaacccgatctttgccatggatgtccagatcacttggaatagccctccgaacacacctaagttgatggataagagcatgaccgagtctatccagagtcgtttgtggaagccccagctggctgatctgagcgaggagtccaatcaagctggcgtggaccactcacgtatggagttgctccagctgtctgctttgttgatcaaatatcattcacagacggtgcaagattctcgcaaagatatcatcaagtttgcctggaactacatccgactcgaggatatcatcaataagtacggtgcctatgttctgatcagttacttcattgcacactacgagactccattcaagattgtaatccaagtctatgtcgcattgctcagggctcatcagaatgaaggcagagcccttgttacgcaggctcttgatgtcttggctcctgtcctccccacgcgaacagctaacagctctggagcagaggcacggtaccccctgtgggctaaatggccacgtcgtattctagccgaggaaacagccaatctccaacaggttatgagtatcttccaattcttggttcggcaacctgatcttttctacgagtcaagggagcactttgtgcccctcattgtcccatccctagtcaagattacaggtccaccaaacacctcgaacgacagcaagaaactcgcattgaacttgatcagcttgatttggcactgggaagagaaacggacccagaatgccgaggctagccatttggccaatgggacatccgagtctccagttgccaggaaacgcaagctggacgaacctcaagagccatcgccgtcccccgctcttggtcctcccagtagccgtgaacgatcggactacacagtacccaccgatttgcgcgcgtcattgatcaagtacctcatcacattcatcaccaccatacccgaacgcttcttggttccagctgcccagattcgcctaatgcccacaacaaaacagcaaaaccctgtgcccaccggtggaatgatcaacaaagctataaacttacttcgcagcctcctctctcctgagtactggggagatctagacattgatctttaccaaaaggcgactgaaccaatcctagtgggtgacaaaggggacaaagccgaggacaaaatcacctacactgtcaatacgctgcaggttattagggtgctcatagcagctaaacccaatgagtggattgctgctcgtcttcctactatccagaagcttctcgaaaagcccttgaagtcggacaacccagagattcaggattgtctacatggactagaagatgacatggatgtcttgcacaagctgccgcctcctgtccgtcgtgttctggaggctattccagatgaacagcctgatgacgaggatgcgatggatacggagggaacgccttcggagttcggttcatacttgtctgccatcgccactgaaacactttctgccagcaactacgtgtcaagtctgaacatcttgtggacgctctccaaggtcaagcccgccgaaatcgatgcccacattcccgcggtgatgaaggctttctctacaaagctcgcgaaggaacatgttgctgcttcaactcagaatggagcccagctggcaaacggaaccaagcccaccgaaggagctccaaccatagatcaacaagagtttgagattggagttgatctcatcctcaagactattgagctcatatctgttagaatgtctcatcttggtgaccaacgtcgtccattcttgagcgttctagcacagattgtggagcggtcacaaaatatcgagctgtgcagcaagattttgggcatggcagagtcgtggatcttccattcaaccgagtcctggcccaccctgaaggagaagacagctgtcttgcataagatgctgcttttcgaatctcgacctgatcagacaatgctgaaaaagttccttgatcttgtcattcgaatttacgaagattcaaaaatcactcggactgagttgacagtccgtttggagcatgctttcctgattggcacaagagcccaagatgtggaaatgcggaaccgcttcatgcaaatcttcgatcggagtttgactcgacttgccagctcgcgtctcagctatgtcctcacatgtcagaactgggatactcttgctgactccttctggctagcgcaagcatcacatttattgcttggttgtgtggacatgacaacgactgcccgcttgcaccctgaggacttcaccctgttccccgtatcattcctctttggcagcggcgataaagacccgagaaaagtcgatatcacggtcgatagccagctggagaccttcgtcgcagaccggagacgattcatgtcggacattggcgatgtcagagttcgcgatctggtcgagcctttatgtcagcttcaacacaccgattccaatgttgcctaccagctgtggactaccatattccctctcttctggtctaccctgtctaataaagactgcattgacttggagaaggatatggtaacattgctcactcgtgagtaccaccacagacaactggacaagcgacccaatgttgtgcaagcccttctggagggtaccgtgcgtgctagtaatccccggttcaaaatccccccccatgttatcaaatatctcagccgaacgtacgatgcatggtacactgctgcgatctaccttgaacaaagtgccattaatcccatcattgacacacctactgtgcgcgaaagcaacctggatgcgctcgttgaggtgtacgcaggcctccaagaggatgacttcttttacggaacctggcgccgtcgttgcaaatttgttgaaaccaatgctgcgctttcgtatgaacaacaaggaatgtgggacaaggctcaacaactctatgagaatgcccaaatcaaggcccgctctggtgccatgccattctcacagggcgaatactttgtctgggaggatcattggttgatctgcgcccagaagctccagcagtgggagattctcagcgacttcgccaagcatgagaacctgaacgatcttttgttggaggctgcttggaggaacattgaaaattggcagagcgagggtaaccgggagcagcttgagtcattgatcaagtctgtgtccgatgctccaactcctaggcgcaccttcttccaggccttcatggcccttctccaatatcacaccaagaaggacaatatccaggacttcaacagcgtttgcgacgagtctatccagctctccattcgcaagtggctgcaattgccgaagcgcatcaccaacgcccatattcccatcttgcagcatttccaacttcttgttgagctgcacgatgccagccacatctgtagcagcttggctcagacaaatgaaagaaacttggataccaagtctgccgagctcaagcttcttcttggaacctggagagaccgcttgcctaatctctgggatgacatcaacacatggcaagatctcgtcacctggcgtcaacacatcttccagctcatcaacggcacctacctcagtcttttgcccccacagacgaataatgtggccagtaactcttacgcctaccgtggataccatgaaacagcctggatcatcaaccgattcgctcatgtagctcgaaagcaccagatgccagaggtctgcatcaaccaactcagccgtatctatacccttccgaacatcgaaattcaagaggccttcctcaagcttcgggagcaagcgaagtgtcactaccagaatccgaaggagctcaacagcgggctagatgtgattaataatactaatctgaactacttcgggccacagcagaaggctgaattctacacactcaagggcatgttcctcgccaagcttgatcatgtcaatgaggccaatgaggcgtttggagttgctctctactatgatctccgccttgctaaggcgtggtctgaatggggacaatatagtgaccagcggttcaaggctgacccgactgactacgagctggctagcaatgctgttagttgctacctggaggcggctggcctttacaagagcgcgaaatcccggaaactgcttagcagaatcctctggcttcttagtttggacaacgacgaaggaaagatcgcaagtgctttcgaaaacttcaagggagataccccggtgtggtactggatcactttcattcctcaactcctcactagcttgtctcatcgggaggcgcgcctctgcaaggctgtcctagtcaaaattgccaagttgtacccacaggccctcttcttcttgcttcgcacgaacagagaggacatgctgagcatcaagaaacagcatgatcagaagcaagagaagttgaaccgggccagacagcagcagcaaggatcctcgccaagtaccaagccaaatcctgttgctggtgccgatagttctcctgctcaaaaagcccaggctgcagctgcatcgaccaatccctccccgtcagttccgcctgcgaattcacctgctacgcagaatttagcccaagcacaaatccagtctcctgcgcagccacaaaaccctatgcaggcatccccacatgctggccaacctccgggccaagcgcaccaaactcatctacaagtgccaggtcagactggaacaccgcagcagaatcaggttgcacttgcagacggcgagaaggaacctctgaagaaaccctgggagtactcggacgaaatcatgtctggactcaagacggccttccccttgcttgctctgtctatggagacaatggttgaccagatccacaagaacttcaagtgtcccccagacgaagatgcataccgactcatagttgctctcttgaacgacggactggcctacgtgggtcgcatgcctggatcttatgcccaagactttaagctgcctgccgcaaccgaagccaacatcacccgattcgcggagacaattctcccagctcacattcgcaagtccttcgaggcggactttgtgaccaagaagccaaccatgaacgagtacatccacaagctgcggcgctggcgtgacaagttcgaggaaaagctcgaccggagatcacagcacacattcctcgaaaactcttcacctcatctgagtgagttccgcttcctcaagtttgatgaagtcgaggttcctggccaatatctactccacaaggataagaaccaagactttgtccgcatcgaccgcttccttccagatgtggacctcatccgaggcattggtgtctgtcatcgccgcttgaagattcgcggacacgatggcagcatgcaagcatttgccgtccagcatccggctgcccgtcactgcaggcgtgaagaacgcattcttcaattattccgaattttcaatggtcttcttgcaaaacgcaaggagagtcgtcgccgcaatttgtacttccacctgccgttaatggttcctctagcaccacacattcggctggtgcgtgacgattcctcttatatctccatgcagggaatttatgaggattactgccgccgcaagggcattaacaaggatgacccggtgcttttcacaatggacaagatgcgatcattggcagagaccaagcagaacgtaagtgtgccgtacacccttctcatatcaaaagctaacaactcccagcgcacgcccgaccagcaacaggttcttcggacagaaatcctgaccgcgattcaagacaaatgggtcccgagtactgtcgtgttggaatactgccagcagacataccccaacttcgcagacttctggctcttccgtcgtcaatttgcctaccagtacgcggcgattgctttcatgacctacgtcatgcacatcggcaacagatacccgaacaaaatcttgatttctcgttcaacaggcgatatctggggtgcagagttgatcccgactatcaacccggctaaggcgttcttctacaaccccgagcaagtccccttccggttcacacccaacattcagaccctactgggtccgattgcaacggagggtgtgttcgcctgtgcgatgatggcaatcgcccgctgcctgacggagccacgccacgagctggagcaacagctcagcgtctttgtgcgcgacgaaatgatgttctgggctacagctcatcaccgaggtgtcttgccccctggacaactccgcgatctggtctacaacaacagtgaaatcatcgtcaaccgtgctgtcagtcttgccagtccaccggagggtaacttgcctgccaatcagaccaccatcgatctgatctcgaaggcagtcaacccccagcatctagcgtcatgcgatgcattgtggatgccgtatctgtgagcgatgcttgtcggtttgcgtgtttttgtcctgtcaattggcgcggggaactatggctattgtactttctgaagagggggctttgtctgggtttgtttttttctgagcgtgggcgctaggtgcgcagatttacttcacgttactatgattgtgataccgattttttttttgttctaataccttctacgatgtcttgatacttcggaatgttagctctgatagttcttaatggatcgatttaattcgatttgactgttatctgccaatttcatcctgtaacctgtaatctgtaaccaacgcatacgatatatgccatccgggacttaattctcactgatcaatattgcgaagcagaagttcggcgatccacactcacgtttggagtagttatggaattaggtatatgattcataagcaaattcgcgcccggataggctttgttggttgatcttgtcttctctgtgcagtctgttgaacatgtcgtcgacgattttgcggtaagatgggtaacagcttctcccagccgtccaccaaggctatctccatccatcaatcggtttccagatatattaaccagtgcggagttcttattcgagatctcctgccattgaatacattgacaattaggcaattcgtttgccgttgctttgcgccgtagatagtgactccattcggcaggacgttctctcgttgagcgtgtccgaggccattgtataaccgatttagtcattcgctcatgatgtattttccccatggtattcgctgctgtccttttggccatgacattcgccagaacacttggggctcaggtgcagctcgacatgcacatcgggcctctgaagggtgaagtgtccactgattgcttccaattgagggggaggtgagatctgatgctcaccatgctgtgctagtatcaaagaaacgtcgtatattgccgaggatacaggtctcacgagctgaggtatcaccgacaatagaaggggtatccaccgacagattaccagacctataaactcaaggtcacggactagatccgagcacggtgacgggccacggcaggacatactagaagaagatctgtcatttctttagatgcgagttaaagggaaaatgcagtagcaaacagttccccgggaggagagctgtgagagtgataaatcatgactactccgtacttgtgccctacgttgactggtccaatcgggactatttgtaactataaagaagaccattaagacgttatcataattcatttcattgattaaagaaggacctttgtgcaacgtggggtcaccacgacacggtcgctatctccgggttgttcgttgaggctgaaagatcatttcttagccaaggacgcgtccttgtccttcttagggcgggaaaatttcgcccagtaccctccaagctcacttttacgcgccatggccgcctcagcttcacggaattcctgctccgctttagcagccatcgcttcagccttcttgcgtctgaactcctggcgcaagttctctctgtcctcggcttcctctctcgccgctcgaagagcctcctcgtcgatcttttcctgaacagtagcgacggcagcctcgtcaccacgggcttcggtgcgctcgatgcgggcattgcgggttcggatttcgtcgagtgcgtcggcaatttgcatctcgcgcttggagtcaagcatcttgtcttcgagtgcagccatcttgtcacgttccagctgctcctccttggcgccgtgttccttctcgagtcggttgagggtctgcgcctcggtctcgtcgttgtacttctcgtcctcgtcgtcacgccaaactgcgaagttgcgctttgcgccgcgctcacacttgtagtcgttgtctaataattgatgttaggttgtatatagcgaagtggtggcaggatggtctcaaacttactcttggggtcggtacggaaagtgatctcaccgctgcagcgagtgcaacggatatagaaccggaagattggaatcgacaggtatctttcatcgagagtctccttgcgcgcattgaacttgcgacccttgggaatgtactcgccgcagtgagtgcatttcatcgagtagggtgtcatcaggcggacaggggacagcttggatgatttgccatccttgcgagagcgcttcgaagagccttcgatggccgaaggatcgaaatccggggggtaatactttgaaagaacctttcgctcagccatgatggattttgatggcgatgggaagtatgggaaagaaacaaaccttcgcaagagaagctctggcattatcggggggcatcgttatctccacgtgatcaatcagctcggttatcgccgcttaagtccgatgcttcagatggcgataagggtgaaagtcacgtgtggatgacgataacagaaatcccccgaactggggctacgcgctccccagtcaacggtacccgccaacagattttgaacttaggtactttttgtatgagtatacaatacaaaaggaacaaagacataacttatcacgtccatttccccaaccctaaccagctaaaacatgaataaccagtcctaatatataaaataatttcgattagatccttctgatcgtatgattgattctatacaattggtatagaagtacctatgagaagcatatttacgcttggtatgattctacccatagtagatgcatcacgtgacctctgtataatagaagacaaaaactgctatgatactggtctggggaggtcttccagttaccatcattttgagacttttaatagtaattcagcccctttcttaacccaatacatattctctaggcgaacactctacctacattattgtacatacatgtacggagtagttaaccttccgccatcacagacacgcacggaccactgtttggttcaaaatagggcaaggacccgctcatgtgaaagttgcctgcgactcgcattgcttgggcatatctccgggttctaacagaaatatccatgtctgttctctctttgaatccattctttaacacatcttctctgtcaatatggaaaggttcctgcgctcctggcgacaggacgcgttgaaccgtggccagcatgattccgcaatctacattggggacaaagtcctggcacttactagtaagggctacaagcactacgaatatactgatatactgacttgcttgtgaaggcagtgactccgatgcgttttggctagcccaggtacacttttccaataacaacttcacacgcgccctggccctcctctcccgcaaagatctcgtttctcgaagcactgcctgccgctaccttgctgcgcactgctacataaaacagaatcaattcgaacaagccctctccattctcggtgaacacaaccccacagacctgatccgcaataaccacacccggcgcaaaatccaacaccaaagccatgttacactgcgcaatgggaagagtgcgacaccgcgcagtgatcgagccgaggagagagaacgcgaagatgccaacaatgtacggtttgaagccgccatgtgttatttacgggggctctgcttcgctaagcagaatgcatttgatcgtgcccgagattgctacaaggatgccgtgcggattgacgtgcagtgttttgaagcatttgatcagctcatgaagaactcgctcatgtctcccacggaagaattggaattccttgaatcattggactttgattccgtctcatcccccgatccgatgatggcacaagaagccgcccatttcacgaagatgctctacacaacccggctatcaaaatactcctcccccaccatattatccgatgccaccgaaaccctatccacacattataatcttgcagagaatcccgacattctattgtcccgcgccgaagctctgtatacgcaatgtcggtttgcagaagctctagaactgacatcttctatcctctccgcatctcagtcaaccgacctgtccacaaatcccagcattccgacacagaacaaccttggccatgctccagctatttatccgcttcacttagcttgcctttacgagaccggtgccacgaatgccctattcttgctctctcacatgctcgcggatcattcgcccgaagagccttacacatacttggcaatcggagtgtactacctttcagtctcaaaggtggctgaggcgcggcgcttcttttcgaaggcgtcactgctagatccgcattcggcgccagcttggattggattcgcgcacacctttgccgcagagggtgaacacgaccaagctatcgcagcatatagcactgctgctcgacttttccagggcagccacctcccccaactgttcctaggaatgcagcatctcgctctcaataatatgtctctggcgcacgagtatctatgtgctgctcacgctatgtcgactggagctgctcccggctccgtgccttccctcacgcctcatccctcagggattgtctccgcggttggtggggatccactggttctcaacgagcttggagtggtattttaccatcagaatcatcttagcggcgcggtcgaattatttgggcaagccctggcgctagctacttctctccactgcgaacccagtgcctgggtagctacacgtgcgaatttaggtcatgcccttcgtcgcatgggccgtctgtccgagtcccttcgtgaattcgatgaatgtcttcgcgtgggcgcaggaggcagcagcatgggctactcgccttttttgggtggtggtacgggtggctcagcggcgatcgctaccgcatctggggttgggggctacgaagatcgcgggctgaccggttctcttcatacgtctcgtggccttgtattactggagttgggacgaaccacggacgcggtgactgccttgcatgaggctgtacgtgtacttggagcgagtggtggcgggggtgccgccgnnnnnnnnnnnnnnnnnnnnnnnnnnnnnnnnnnnnnnnnnnnnnnnnnnnnnnnnnnnnnnnnnnnnnnnnnnnnnnnnnnnnnnnnnnnnnnnnnnnnnnggggggggggggggggcggcgccgcggggggtgcaggcgtggctggtacattactttcacgtgcacttgagctctgggcattggaggggcgacaaagggaccatacggcttttgaggagagtatgcgagaagccagcgcagcctcctccaagcgccggggatctacccggtcccgtgaacataaagggaaagagcgagttgccccggaagagatgtctcgacggcgtgggcgtcaggagccctttgtggaaggatggacggaggaggtggcccatgtcgccacagccacagccccggccgaagatgaaaaggttgagatggatctcgacgacgaagctgacggccttttgcgccgagctctcgaccgtgtacgacacagccgacaacgtcgaccagcagtaccttctaccccggatatggatgccaatgagccggctgctccatccagtggccgcagtcgggggacacgacatgggcggagtcactctagacaatgacggggcttttgaatcctcctcaggtgaaattttgcgttatgttccatgcattgcagcgggcgtttctgccagggaaagttggctaggggttggggcaattgctttttttatggatctcatactagacgatcaaacagatattgttagggacattccttatacttgtatctagtttgatggaggaactagaaacggtagttcaaacagagccctcttcacactttagcctttgaagctattttttatacggcgtagcgtcccggctattatccactagaggcaagtactagtatagatcaacagaacagagtatgttgttatgttggagtatacgactatcgcccccaaataaaatcaacaatgaaggaaaaggctcggtgagacggtgacttggtgtcttggcaatttctcttctctttcttctctttgactgtctgtctcttctatgcatatcggaggattagccccgtccaaccaatctcattatatcgatccaatcaaaaaccccaataacgcagttaaaacccaaaaacaggtgatgacgccgctgcccccactgggtgtcgggctgaggctcgccaatccgcccgtacggggggcgttttagcggcgatcgtccgtagttgcgcatcactgccatttctgggggcatgtttcagggtttgccttgatcggcccccttctcttgtttcttgccttgaacactctttagacaattcctctgcataccttctgacacctccagatctctccagatccctccagacaaattccaagacacttccagatcatgccgtgccagtctggatctttaccatgacagcctcatttcctattcgcccacgacgcggcttgtcccttctgtgcgtcataaccgcttttagcttcagcgccatcatcgtcatttggtttggcatgaactccgaccgagaatacattcaccctgttctcacccagttaatccccgccggacactgcgcctgcgaatcctctactaccttccagtgctcgacatgcctcacctgcccagaacccggtctacaaacagaccggtcccccgtttggtcctttgaatacgcccgcgacggtcataatgagactctcaacaagagccagtgcaaagctgccttccccgggttattcgaggatgttgcgcgcggtggcaaattctggtcttcgcatggtcgcttgtcgtcggtggaactaggcgccatcaagatcgaacatggtatggcgcgtgcatttatctctaatggccaattatacgtggtcacggcgcggtccaagggggaggatcaccgacggaaaattctggggacattgagctcaatccatcgtgcgctggccgccgacccagaaagagcttctagacgcgactttgaatttgttttctcggtggaagataaggtcgacgatgtgactaacccggaatggccggtttgggtcttttcgcgcactccgactgaggaaggggtttggctcatgccggattttagcttctgggcctgggataaccgcgacaactacatggggccgtatgaccaagttgtggaacgaatcaaacgaagggatattccttggtcagagaaaacgcctcaattggtttggcggggcaagcccagttttgctccaaaattgcgacgcgcgttgatggaggccgctagggacaaatcgtggggcgatgtcaagcaggttgattggaacacgggttccaatgtccttaagatggaagatcattgccattatatgtttattgcgcatgttgaaggtgagtctaatttctcttctctcccgcgactcgaggacgccagctgacgacgtgcgctattcaggtcggtcgtactcggcttcattaaaataccgacaggcctgcaattcggtcattgtcgcacacaaactccagttcatccaacatcaccactatctgttggtagcagatggtcccaatcaaaactatgtcgaggtcgagcgcgatttcagcgacttagccgaaaagatggaacccctggtcaacgataccgaagccgccaagcgcatcgctaataacagtgtgacgaccttccgtgagcgatatctgaccccggcggctgaggcttgctactggcgatcactgttcgatggctacgccggggtgtggaacgggactgtcgaacagtggtccgatcgtaaggaccgcgaacgagggcttcgatacgaatcatttgtgcttctggagagcgtgaagatgtacgaattcgaagctgctatcactgaacaatggcaggctattttgtaaggataggcaaacagaatacgggagactacatacaacccacaataatacgttaatacctaattgcgagccagaatagatattgtctacaacatagtctttgatttaggggtccccgctgacttgaccagcaccatattttattttgccggcagtatagtttgtaatctaagtatttttacatctgaatacgtcgacagcacagcaacttcacgattttatatattagttttgtacggtgactgtgcttggctggttagtaactaaacacaggcggtgagctaggcggtcaaaattaaagacgtagtccggggccgagaacagccccactcgtttccccgagcttcgcattgtttcaacgacagggtacgttgaactcttacatttcaagatttgttcgtacttggacatcaattcatgcttctttgattttatagagtgcttcgttgcgtcattctagtcgatcaccccaccgagcacccatcaagcagtccagtctacttctgtttattcacgaagaccccaacttggttaaaataacccgacaacccagcggtgctagaatcccaccctgtacaaatcagcatacatcatcaagacctagcagaaaaacacttactggcgtcatcttcaaccgatacgcaggatcaacaacccagctaacccttcccagcaaaacaaacaacaaaatcttcacctgcaacaatgcaaacccctgcccaaggcacttccgcttatgcgcattaaacggaatatacgttcctcgaactgtctccctccgaaaccgcccctgcatctcctcaacactctccccccacctctccgcccggaattcgcgcgcatcctcaccccatatatccgggttactatgcaccgcccacgcattccaccccacaaatgtacccttcgcaatgggaagttccccacccagcagtgccggccgcaatgcgacacggttaatgagctgacagacaggcgggaagagacgaagtagctccagcaccacggccgtcaggtatggcagaccgtttataatttcctgggatggattcgggtgagttttggccgtatcaagaatctcctcccgtagccgatcctgtatatcgactcgagtgcccagctgccagaacatcgaggttaccagttgctgggcgttttcatgtgcggttaggaatgttatcttgaggttgtcgcggaattgtttctcggttatgcggcctgatgtgtatgcttcgcccagcatgtgtgagaccatgtctttggattgggtgggattgatttgcgtgcgcttgtgaagcattgccattatcattgtgtacaggcagttgtcgaattcgcgcattgtattgtaggcacttttgcgtgacgggaatagccaggggaagtgatcgaggtccgggaagctgaagtacattggtttgaagagggttgctttgataatagattggagggcttcgattcgaacggcgccgtttggttggcctagactctggtgtgggttagtcttctgtcttcagttttcagctattagagattgaatgttcgtttcagggaggccatggcaaggttgacttgataccttcaaatccaagtccaggaaattctcgctcatcacatccacagcccatttctgtacgtctgccataatcaagattcctctattcgctccaacctccttctgcagatcgattagaacatcgaccagcttcctcgactgcttcagcaaggacgttgtctcaaaaaccttcttttgcaacccggccttcataataccagtataaaccttccaattctcaccatgggcattgatgatgttatcaccaacaagcgtcgcaataacagcatgcggaatcttaatctggctcccggctttcgcatatatatgttcattgcggaacatatcagtcaaccaatccggtcgtgaaacgagcacactccatcttccagcgaaccagactaacacggcgccgtgtttctccagtggagccctgaaccatctttcgtagatctcgtcttggcccattgaggaccataaccccaggattgagacgtagattggaattctgggcagatttggcagtgttcgagagacacggaggtaccaggttaggaagaggagaggtgggaggaggatgattaggagtatggagagaagtatggaggataaggctaaggccatgttgggcgtaggcttgatagatttggtagaaacgagaaccaaagagaataaaacgggggtctgctactctattgctggtactatacagcgaattaggcgtctacttggtccgccgcaccctaatgcattaggtgtcagcagaagtcaacacgcctgcgctgaggtcgtactgtccaccgtacctttttttggccatctttctgctggattctactgctaggtggctttggtgtgttcaatttgcattttggtgattgtgcgctcaacgtttctgtgtggtgaggaatatagtcccccaaatggtactcacaaacggaggttacaggatgtctagcttggcaacttgtggatatagtaatatggcctagtggtcgctttgactgggtcactcctcgactcattttctcatgaccgtcaggtttccgtcggggtgacgcttgatctctgcaggttcaccttcgcgcgagatttgttccataactcatgacggcattcaattatattctcttattgaatgcagactatgtgatgcttaggaagagactcagcctagttgaattggtacagaagattgctatagactagcttgctggtattgtatctattgggttgaagaggaatatgtagacagccacacatgtaccaaagctcttgtccaagatctgaaataggatttgcctaagctccagctaaaattgtagcagatagcgagaatccgtaaaatacagtggctatcatagcaatagcattcaaatggatagccattacatgatttcgcgcgaaggtacggttagcccgaagcaccttcgacccatcggagtcagcatcggtgctctcgcttcctgcatggtgaatttatgttagtcgtataatcaagtttggcgcttcacgaagaacctaccctgtagcgccctcctgaccaacatcgcagtggtcgtccgaggtccatggacgaaccaattcagacatcccgtcaaagcaattaaacaaagagaagctacgccccatggatctttgaccaatgacaaaatgctgtatggtgggtatgttgctgccgtcaacactgtgagtccgacctgggttccgaagtagatggggaaaaggcgcttttggaggataatgaactccttcattggtaaaacttggtagcaaatttttgtattgataaagctctagacatggtgagtcatgagatttcttgtttcttcaggggacaagagacgtacctgatagagctcagtcccgaggagagagccataagagagaagatggtatgggagaaggctgcccactgtcctgcgaaaagagtccattctatcaagctactctgatagaaaagcttgtggtgactggaggagggaagatagcagagtcggagacagtggtagtactatttggctggcctagccgccgacagaatccttgacgtactggctgagatgtcgaccaacaaagtcaaggttgatgaattgatgaacaatggttttagttgtctatgcttggacagccgcccttagttgtagtctcattatgcaaatattgccttattttgtatatattctactatcatgtgaatgccatgctgtattgctttatattacacatatggagggctgcacggatttatttatatcctagactcataatacagacggagcatacaaaccacttgcgggataacaattctctgcatcacgcagttacacagagagatttgctttccagaatccaatccaacaataaaccgaactggatcttccgccagttcctacggctagatctcacatgcatatatccagggagcatgaagcatgaatgagcgatcacagtggcaccacacagcagtgccccatgttcacgaaagaagttcattgacactctgagctgttggaccgagaatgggaaatcagcccgtctatgacgccactgcatgaatgactccttagggaggtgctcgtcgccatatcctcggactttcaaaccaattgacattaccaagaaggtaatgtgacctttccaaaccccagagtaagaaaatatataagaaaactggcagtttggatcaaacccggagtatatccagcgtgagctcattgttcttgcagcattgagggggccaatacacgacgtgtcttatttttagacttcagattgaacgttgcactagctgtacttccctcgcaactggtagcttgtcaccatagcctgaactccctgtcttctgtgaactgttggccgctgtcggcctataggaaatcgtctctctgattaaataccaatttgaacatcagacaatggcaattaccattgccatgtgggccatgtaatcgggtcgtatataaaagctgaattcggagatgtccgaatctacaagaagatgctttgacgacaacgtgtaatttaaagtataagtaggcgggatacttatccaaagtaccgggggcacgtaggttaccactgagggaatggtaagacggttttgccacgtcaaggagtctaaaactagtctggtgggctctgacaagcgagtcttcgagccagtgagatgggttagagctgagagtttcatgggctgtggcgaatcccaagccactagaaccaaggaatgaaagaattcagggcagcaccatgtccatgcacatgcccatgccgaggatagcctcttattacaccccctcgtgcgaccatcatgaaaccttctccaagaatgcgcgagtcggcacaggagccttttctgcaaagggttggcaagctgagaaaggcaggtattttgacatagtcaggtaaaacagcatcacgaggctgaaaaggcggaggttgaaccagtggctttcagaccgaatcactgattacagaagatccgttgtacaagttgcgtcacacagtgagatcaggcgtgactttccctcgtgggcgcacggcctgtataaagccaagggaggctgacggcgaggggccttttccctctgagttcctgtgctggatatcaactcggagcctctgctgacgagatttatatgagatatgcaacatccccgagcccgaaaatatccctcaagaccataagaccgtaaaaaaacaattctttacaagataaagatggaagatcagtctatgagtcccaaggatgatattctcagccaaacacaagatccactggagagaaggagactgcaaaaccgcctttcccaaagaaaccaccgtaggatattgccccaaacagagacgacgggttggaaactgacagagcctaggtcgcaagattagggaacgcattgcaaagcttcaagatcgcgtcatcgccaacgaactgagagctgcagctgctctaaatggatgggatcaggtatataatccttcgctgttcccgaggtctcattcctcttactcggagactgagcccgtctttacctcgcgcggtgtctgtgtctcccctttaatcccagaccaatgtacctcattcatgccgtcatatccaccgttctcgcaatcatggccaaacgacctcaacacattcccacaacaggcgtaccctggcgacctatcccaatttactggagtcagtgaagcaagtccaatatatcccataacaagggctccagtacagctgaaccatatcacatcaccacccagctctggtatcagcggggagacataccgggaaatgataagtacaccggagacgttagtaccagactctttgtctacagcagcacccaatcagccgctgtactacgttgcaactggtcagtactccaactgcacggtatatgagttattatctgagccaagaaactgataaaaagtagaacaggcattaccacaaattatccaggtcatcaacaccatgtctccccaatacaaagtgattgttttggttcccccagagtctccggcatcggcgtctatggctgtattcccttctccaaattattcatatggttctggtcataccggcccaaataatggtcctgcagcacagcagtctgactcccagagcctgggttgtctgtgttatcctcaaaatatacaccctgggccgcctgcgtactccgcttcaaaatcatggatgggcggggggtcatatttgcaagcttgtccattacacaagatggcaaattcagttaccccggggggagcgtttcctgttaggatgatatgagtctgtgtggcggtgtataaagatagaagtggtagagcaggggccgatagtgggatatatacaaagaatgggaatggataaattgtgaatagctagatttaccgacagtgaaagcttatggagtgtatcccgtataatagtggtccggaatatataagttgactatatgaatgaggatacttcgaggtagacttaccaccctaactggattgaatacggaagacacttccaatgaacataatgaggtaatagtagagttaataaaaacggtctttatcttcatagttccacgcaactggccagatcaaatggcaaaagagaagaattaaaggttaaccgaccaagtacggaattccacagacacagactcgaaatctattggatattgtattgaagacttgtgtaattgcttcagaatactctatatctttgcaccaaatataagccaaacatgagagcaagaaaacgagtgaccatggacagaaaagaataacagagcacacaatattgaaagcaaagacacataggaaattctcagtcacagtgaattcgccacagctcccgatcacagttactgatatatccagtgcgagtatgcagcatggcagtattatcactaatcagcagatcacccttctcccaaccaaagcgaagacaaactctatagtcatatgtgatgcgatccacaacctgagctagatcattatcgtcattctcaattgaaacctcacaggtcgagaatttggtcttggttgagtcccatggctgatgccaacgcagacacggaagaccagagatagggtgcttgacgatcaacggcaaattcttgagttttgcattccagaacccatcgttgtccatagcccaggtaatcgtttcgagacgttcggcagaccatgggagaggtaggtaccggaaaaacaaccgggagctcgcaaacaaggtatacccattgccctttggcgcagtagcaggacaagtgaagaactgatagcccggtgggtgttggactttcttcatctcgcctgtttctgggtcggtaatctcgtcgaacttgaacatcccatcaaaatgcattggcatagcctcgttcgaggtcacattgttgcccattttatcagagcggccgttgtcccatactttttggattatgccaaagctccacgggagaatagtacccagctcttctcccttttggacgtagagatcttcttctagagtctcggaaaatccacgtaggacaatcggggacatgccattcgacagctggcggacctttctcatggggatggagcggattgacggtggaggattgacattgtcgatatcggcggggcggatgatgagtccgcagggatagagatgctcgaacttgacagataagccgtcctcggtccagtcaaagagactcgacctttcacggaagaaatatggttgtccgtttttatagataaggtcgtgcgtgtcgcgtacatcttcagcgtgaaccatgcggtataaaccatccagtcggacagccacaacagagtgccaaggcgtatgacccagtgttcctcgcatctgtggaacaagcgagatagaaagctttttctcgcctgcagactcgtggatagacagtcgtacgtaatctttgcggttggctttgatggccgccgcgaacatcttgccccgaatgatcatctgccgtgcggtctcggcaatatgcgcttgccgagcgcgttttgacatcgatttatccttctcctctagatgagccagatctttggttagaaatttaatgtagccccggtatgttaggcatgtatcattgtcggttttgatcgcctccgtcgcatcgaagctcgggtcagcaaaggtgtacatcagttctcggcggagacaactagcgtgggccaaatagaatgcctttgcggactccggagttgaggatgggaaccatggatgctcgagaagttcgaaaaggcgaataaatttgacatgatggagctctttttcgacggccatttttcgcagggcctccccataatcccaaacggtttcatcggggacgctcaggagatctaacacatgtcagtattccagctaggaaaatcatctcgattgtgttctttaccattgtataccagcccatccgaactgatgtagatatcggcaccaggggcgtatactgcaccgatattttggcaaagtccattcaaatgggccaatgccaattcttccccaaagtcgggcatagtacccagcaccttactgcgtgcattaggcgacttgaaaggaaatgcgggcaatatcatgcggatgggctcttgtctggcgatttgctccaggacaattggaacaaacgactcaaagcccttccaggagataccggccttctcaaagtcgacaccatagctttcgatgatcttcaatacctccatagctatcgatttattttccgataaagtattcgagatttcagaggtgaatccattgacattttgttgagtaccattgccgtttgaggcaatggtcaccggatcggcactgtcatattgaggcgtcatctccacagtctgcatcttgactttctgattggacattccattgccgaagaatgggattccattctcagcgagcttagggtggtatgtagtgggaaccatttccgcacccggtgccaaggcgaccattgtggctcgatgtggaatgtatgtttccaagggagatactctgagccaggcactgatctacccagaaaaattatgagacaaaagcttgattagaaggtaactgtattggtctcacttgagtcctgaggaaatagataagatgtgttgttttacctagaaccagatggtgctatataacctgcatcggctaaaacagcaccagctagataactgacctcgagacaggaccgttccgatgactgtaactcctaatgcggaccaacaggtcaagtcttaggttcaacctagggcatcccagacaggaatggccatcaccctgtacaacttggggcctttacttctctacttcatcccatgaatgaggtaattgtggagggaattcgctaaaaagccttggccaatttggtaaaaggcttgaagttagattcggtagatcgaatgctgagtctgagaagcttaaatccaaaaagcttcactcaaccgttcagtgttgttagcaaagatcatgtagaaccaaagaatgaggtggttggaaggatattcccagcgtaaatgagaaaagcctcaattatacatggtgtccaatgactcgcaatgcatccaagtttcaaatttattggacagagctaagcacacgtgttgtgacacctctgctgtgttccgattccacgctgctacttgattcacaagatagtgttcgcgaaacctgcagctcactctttgagctcacgccaatcatacttcataacccgagtaacaaatgcagccatgtcatgtgttgtcaattgactaacaaggtagcatgtggcgtctaagcctgagccgacccctctggccgtgatgagtcgaacaccgtctcattcaacagacccccatcaatgtatcgcctgtgcagtacagtagtagtatgatcccccagagcattgaactgggcacaaatatctcgaagtctgtcaagagcatgatggtgggttgtaacagtcattccgccgagtatacccgcagccccgagcagaaaggcgcccgtgcaaatcgacagcaaaatcctggtgcctgataacaaagcaacaggtagcgctacaaacttgcgaatcaaatcaagctctggtgtgctgttttctagcaatggctgcaaaactgacgggggaccacctgggatgactaggatatgaaagtcggaaattcgatcgaccgcgtctggcaaaagcaggtctgcatgaaccgtaagcaaatttgcagcacgaatcgtggggctgcaagccacagttgtgatttcgaacattcttttggggttttctgggtttcggttgtgcgagacatgggataggacttcgatcgggcctgcaaaatcgaggatgtctgcgccaggaaacaggaggaccccgactttgtagtacttgttggaagatctaagagacataattgccacgacaaattgcaatttggtcttgcaagacgtaccgatgtagacgtttttttggcggaagcgtgggaaggataaataacagcagtagtgagattctcagagctgattctgggatttcgcttgaaagagattagaaaggctgaagtgcattttacctcaaagcgtttctgactctgctgactccgaaaacaactgctcgactttgtccaacccgggtctccgcattcaccgattcgacgcttggagattcttgcaagatgtccatgcgcttggaaacgaggctgtctcatagccagtactcttcttggtgtcagcagctattggtttaagtgctcgtagatggatcctagtcttctagccacatcttcaaccagtcttggtatatgcctagatcctggagtgccagtgtgccagcacctccctgcgcgacgcaacgacttcagggagagttcatcgccatcattgaactttcctggactcataagtactattgggagtagcatttggaataaacaaaaagtgaccagaaataatataaaacccaattgattcagaagtcataaccataactattgttgtaggggattgatactcctgcctggatttccagtaccgcctttctaattaggtacgatcaatttcaatgcatctgctatgggggagaccatgattaattaccctagggatgtgggctcactctactccgtacagctcctcgctgaatggagaatggtggagtgaaatgtaaatctgaagtagagaagagaagaaaaagagggccttttattacaagctcattcttgaatatcgctgtggcgattaactacttttcgctgacgaaaactaaccagagaaggaagcaattctactccgagccttatggaaagggaaagactctgtctttgcataatcctcggtctacagaaagcgtattagatccaaagtatcgcgatttaagattctgtaagagagattatacacatactatatgttcaacgacggatatcacactgcagaaaccctcaactcgtaagaacagcctcccctgcaataattgaaggaaaaaagtttgcaaaaaaaaaaaaacgacaatcatgagttgaaccgaaaagagactccggcgccgcgctgaagaaaaaacaactgaaaactaaacgcttttcgcctccaatcactagccccacaggggtggatgaatatactccgctgcgcgatccagtatgttgggcattgtccattcaccgctagcggagctttctggcgtagggggcggaagggaaccaacgctgggagtcatgttcgcctgcccaggaccatatgcccccatggaagcggaagtcgggttgaggttaggattattggagtaaacgggcgtaccattgcgtcccattgaacgcgtagatgggtttccaagtgcggcaagaagtttttgcaaagcacgatgtgttttcgctagtgacttggcccattgcgtttgtggatcgggggggatcccaaccggagaatttggatccaccgggatgggacctgtgaggttcctgacgcccgtgattgggtcgtaagtcccgagtgcttggggcggcgatgtcatactggccacagtttgggcctcgttggaatcataggcacgttccgtgcttgctctttgggcgatgatgccctcgagtgagtagagaagattccacacattcgggtccgctttcgcctcatcgatgacagcaagcaggaatgcggaactaatcgcccgctgcaataggatccaggaacgagctgcgtgggagctgatgttgtgcatttcgatgtaagcttcaacggtcgtcatcagattcataatgcatttttcgcgcatgctggctgcgttggcgtggctcaagtcagccatgggtttgagcgctggccggcagagctcagaggcgaaataagaagcatgcagttttaacacaacgcgctccaggtgctgcgtaggcgtggaacagtccattgcctctcgcaggtatggctttgcctctaccatgatcttctggatgcggtccttatatgtttgtatgctttccaagcttatctgcgagtgcgggctcaacatgcgaatgcggacaacctctagtgcaagagaaatgacacgagagagactttcgaaataggataaatcgccaggtttggagccatccctataagcaatatctggctggctcactgcagtggtggaaggccggtcgtaggagagcgaaaaatggctgtcttgccatgccatggaccacctattcatgtcagggccacatactttcgggctacgaacgaaaaattatcttaccaaacatgtcgtcggcggtatcgttcagctgacgagaagcgactcgactccacatggagaccgagcgccaagcccatgcgaagtgtcatgccgagcaagacataagaaattccaggattcatgttgtatgacaaaacgtttcctatcactaggagagtttgaattgcctgaatggtgggttgggagaggaaatttgtcatgcggaggcactggtaagagcagcaaactattcaaagtgttagccaacgactccaataagaatttcggtgtaggtcgcataccataaacctgagaggttaattccctttccttgctcccatagtcggatgactggcacccagaggcaaggatagcgaacagtagtcctaggtacgcaatgcttaccccgaaaggcttctgtgcttgatctgcatcggctaggtactcgccacccatggaagctcttgttcccagcaggagctcgagtgtgttctcaaactcaaagatgtcctctaaaacagggtatatggctcctgaaatatctttgtagtagtagaataatctacaagaaagcaaagttagcccaaccaatctcaatcaaggggttcaatttaagaaggctactcactctctgcactgttgatcagtgggaagggcgctgcagacggcggtaatatcgaatgttgacatatcggaggaccatagatcaacaaatggatatgtcgcagactcattgtccaaaccaagcttgggcagtattcctccttccaaaagtgcctgaagttgatcagacccagactgattgtttaagatataagccataacagagcgagatcccaaatgaaccgtgcctttgccaagagtattggcagcatggatgccctcgcgttccggcgaggcacacttggaacgggaactcgcatcgccactatgcacgcttccggtttccatggaggctgggaggccgtcttccgccctctctaacccgactcgaagggaggaaatagtagactccatttcctgcaacctattgcgcacattatcccattcctcgcgggcgattgatatacggccaccacctgtggcagggacactcggtcggcttaaggttggctcgtgtttcacttccgctggggtttcatcgaacgcatacgatgctgaatattcatgcacgggtgccgttgacccactagggacagcgctatcatggaaggcttgcgatcgcttcttggaagggcgttcgtaggagcaaaggtctgcatggtcgcgcttaacgcacccgtcacacggcagattgcgatcgcatttaaccttgcgcgcatggcaggggtagcaggcttttggctcgcgagccttgcgcttcgtgcggatgatagcgtctacctgagactgcggcaaatcggagacccctcggttggacgcagcagccatgtcggacgcaacggagggcgagaatgaatttgatgttgggtaaggagacgtcattctggctcaaaaaaaaaagacttcggtacaatatatcaggcgatcttgtgaagttgtcgttgtcgttgtcggcctttacagcggtgtttcatccggtcattggcagcatgggggtggaggatcagaagcggtttgcgagttggaaagcgagttcaatacattaggcaggtacagttccataagttcatcagttaaaccagagcagcatgttaggcaatgagggctcgatttgaaattgcacacgatttgttcaagggacctgggattaagcgccgggaccatgctagaacggcacgtgatgtggggcgtccaaatggggaatcaagccctacgtcagtatggtatgcccttgaaaccttcctagtctcgttataatttgtaaagggcgtaggaagttggcagtggatatctattgtgtattgcttctagaacttgcttaagaagaatgattgcttttgatggcaatgtagtcttgtaactcgcaccgatgcttcaggctgttccatttcatggtctcgatcgacacagaccaggaaatctcaggccatttattgtgaaaagaacaattccatgtgtaatattatggcttgaagtgcttattggataatgatgtcgttacaatgccctcgaaaaccacgtagacgggcaattttccactggggaaaagttaaaaaagccccaaagtggtggctatgcactccagtctgaggcagtccaaaccttggaatgccatttttttttactatggcgatacgaaactaaatggcatttataataaggagtgccaagggagacttcccctaaatggattagaccactgcgccaacagggtttgccctaacaaagagtatggatttgactacggagtatgctgtagtgtacatgtcgggatgtatcctagaaaacaatgacagtatcagcgggcatagactgcatctgtagttagcatgacaccatgacttcaatattagcacgtttggtaaagcgtacttgtcctaggtacagtctgtagtgccgatttagatgatttagatgatttagatggtatttcgaaaagtgcttgcaccggtatctcaatatttgaacgttacttgctgttcaacgtactctgcggtttgctgctgattatttgcttcgaaaaagcacagaaagaaacagcatttttctactgcggaaaacgaacggcacattgtcccgtctaataaactatattgaactcgtctttaatgcgatcggcagacgataatttattatgggtcctgtatatacgcggggagacttcctccatatatgattggtctgttgtgaatatcctgtgagatgactccttaacggtgcgaggatatcgatttattatacggggtaccccatactatgtggcccttcccagaggatttgcaggctctttagtaaaaccatcacttaaggagaaccccctaggcgatctgagtatttcgaccataccacacgcttattctccaatgtattattggtctgttagggtgttctagaatgcttggctaatcgtgccaagcgtccaacccaccttgatttctgctgtgttgacgatcttcggggatgcaaaagcgggttaccccgacgattataaaagtgaataagaacacgccattctccttcttgtatctagttgaaattttaaaaaataacaaatgagtatgagagtatgaaagaacgctgaaataacaataaccttttgtcctatgatgccgcccggggcatctttcgatgtaagacgagtctaggtacttgcaatccacatcgtgtcattgtcgcacggggctgacgctgtatatagcatgtgccgtagccatgggccatccaatctatgatctgctttgccacactaacctcgatatacctcatattgcactttgaccaatattgtcatccgcattcgcttattatccagtatagtaacttcaacttcaaccactggaatagtcatgatgctaccgtcagccgtacttgacaagtgttgccctatgactgtgggttctccggtcgatgttctcatcatatttagaggatcactctcatatcctgacatcatgcttgccccagtgtcatatagaagtccgcataccacctgctatcagggatacgaatagcaatcttatactaagaagaaatcaggattgatcaaacgagaattgttggggatataaagtgcgaataaagtatccatcgggtgggagcattccatccagactaatggccgctgatgaatacgtaggaccgggtccaaccagctatttgtgaacctctcgtatcattacgagtctataaaacgaacttccagggaaagtcactcctgccatctataagtgtcttgcttatagctcaaataccttcgggtcttcgcgtcaggggtgagggggcaagggactatacaaagagaaatagatgtacatagtagcattgaaacggttgttactgtcatttccacttggtcaattggggtatatcaaagaaagcgttcagagttcgaggtagcccaaggagtatgccttcgcagcatacaagacacttactttggcagatctatgcctcgggttctttatattgaatctttgtgaaagcgttggcgagtgagtacaaggaaatggaacttgtttgaacgatctgacattgatacataccattttggttcatcttggcatgcagtttgctgatcgatcttcctttgtcttgagtcaatactcatttcttgtttttgcttgtgtaaattgtgatattttgccaaaaaaaacttgcaattgtaagtagtctgtgtatgatattagaaatgcagtagatggtcataaaagcaagcttgaaaattaatggcagcagccattgtctgatgttcactagggtgagaaaaccatctataacatcatgatgatcgatcccttgaagctagttcaggccctatcatctccacggagaccagggcgatggctgagtcgtgtggtacaaggtcaacgaatgatttttcacactaaatgagtggaagctgcacgacaagtcgaacggtttaagatgcgtccaagttcctcagctttcattttattaatttcgctagttcatgtgtcgacattcgacaaaagatgtggcggcctgaggcgccatgaacgggacggaatatctatatcccggctgaccaattgagagaagtgacgtaccggccagctgccagcgttgtttaggtctgtcacctaactcagcttcattgacactgacattgtttttttccttccgtccacctgagacgaagcacctgttgtcgctatcaaatctgatcttgattcctctcccaatatcttctttcagcttcgatcaccgtaacccgctaacgaagctcaaccatggagggcaaccccgcggagcacgatgaggctgtgtctcaattctgtgctatgactggaactgaggcttcagaggtaagcttcttgctgtgtctatacataacttagtcgctgattttgagtgcgtgattgtctaggctcaggaatatcttgttgccaatggttgggacatcgaagctgctgttacggaattcttcgcggagcaggacgaagcttcacaggatgccggtgctggtggtgcgcgaccactaggcacagagggtagctctggagcttccgcggggggtagaactctcggcggaagtgccgtaccagcttcatcctctgccgcagctgggtcctcatcatccgcccgaagcgctgcgcccaagaagaagtttgctacattgggagactttgcttcggggggaggtggcggcggtggtgattcttccgatgacgatgacaccgacgaacatgatttcttcgcgggtggtgaaaagtccggactagctgtgcagaaccccgatgatttgaaaaagaagatcctcgaaaaggcccgcaggtactttctcctagagatgctacgaatgttgaactcaactaacattcgaatgtcaacagggcgcagcctcctccttcagacaccccggcgccaagggaatcacatttcactggcactgcccgcacactcggtggtgacgatgcaccaagtcaggtgattgaaaacccatcggcgcctagtcaacagcgtgcccagcgtgttcaacggactcttcatttctgggccgatggattttcggttgatgacggtgaactgtttcgatcagacgacccccgcaatgcagagatcctggacggtatccgccaaggccgcgctcctctttccatcatgaatgttcaacctgggcaggaggttgacgtggaactcaagcagcatgaggagaagtacaccaagcccaagcccaagtacaagcctttttcgggctctggacagcgcctcggaagcccgacacccggcgtacggagccaggcgccaacaccctcctcttctacggctagaccatctactcgggagccaacgaagcccaacgtggacgagtcacaacctacagttaccctacaaatccgcctaggcgacgggactcgcttaacgtctcgattcaacacgaccgctaccattggcgaagtttatgcgttcgttgcttctgcgaccccggatggtccaaaccgcgcatgggtcttgatgacgactttccccagcacggagctcaatgactgggctgccgttctcggcgacattcctgatttcaaacgtggaggcgtcgtgatccagaagtggctgtaaatgcactattaatattctctttcgtcttcagagtggttcaaaaagcgaataccagctgggcagtggggtttgtatggatgaacgttacatgacatatctgataccgaagagggaccttcagatttgctacgtagatcaatggaatatcatttaatgacctccaaattcaaaataagtggttaaatcgacctttcatatcccatactagtgcgtccacgttgtagaccgaaggttagtcagaaggcgattgataagcgcccgaatatcggcctccgcccttgaaatccgtcgttgagctttcagttgctgcaacatttcttttctccaaattaaacatacaatatacaactatgcctctcactggggtgaagaatgtcgtgctggtacgtgcaccttcaatcccttgccagtcctgccagcgcgaaaaaaagaaagcccatgcccctcatagcttatcgataacgagagctgctcgaagccatgggctagacacccaagcgcaatttcttagacaaaactaacaagaaacgattggaatttagatcctttccggcaaaggaggtgtgggcaaatcctccgtcacacttcaactcgccctcgcgctctcgctacaaggaaaatctgtcggcatccttgacatcgacctgacaggaccctcaatgccacgcctagtcggactcgaagatgcaaagatcacacaagcgccaggcggatggatgccagtaccagttcacggagctgaatctgcagctgagcccgacgcctcagcaccctcaacacaacccccacgcggttccctccgctgcatgtccctaggcttcctcctccgcgatcgcggcgacgccgtaatctggcgcggaccaaagaaaacagctatgattcgccaattcctctcggatgtcttttggggcccgactgattacctactcatcgatacgcctcccgggacgagtgacgagcacattgcgctagcagagcagctgctcacactctccaccacagacgtagcggcggctgcgcaaacaggcttgcctagacttgctggtgcggtccttgttacaacgccacaggctgtggcgacctcggacgtgcgcaaagaagcgaacttttgcgttaagactaatatccctgtgcttggagttatagagaatatgtctgggtatgcttgcccctgctgtggggaggttagtaatctgttctcgagtgggggaggacaggtgatggcccaggaattaagccttccatttatgggcagcgtgcctatagatgtgaaattcggagaattggttgaaggaaagatggaggcaggggatagtgatgatgaggaggaggaggacgagagtccaaggactcaaccacaagatagtcccgccgagcctgatgatcgaccgctcgttgaacgttaccgggatacctggtcttatcctcgatttgagggatttgcgcagactcttataagggatattgagtgcccgaatgctgtgtagcagtgttcgtcgtgaaaaaattgtgtttgattgcttgttttctagcgacatatcttccttctcctatttgcattgcgtcatagaaggtgttggcaatctctgaatgtcaaatcattcaattataaagtctacacccggagctcgagtaggtagtgtatggtgtatgtaatcttcttgcaagataactatggtattttccctgatacctaagtcccaaatcgccaagcttcttaatcccgttcacttcctgtcaagaagcgagaccgccgttaatgccggtttatttacgtgtgcctctgccgaaagtagataggcccactaagccaaggtgaaagtggctttaaattagcaaaagatagaacgtaagggagcgtattgaaatatatataaactcccacatggtactctagcacatgggcttcaccatttcctttggacttgttctagatcctaactcacggtaccgtagtgaaaagtctttccgaaaactatatggccgcacagctgcccagaaattagcaacacatgccaagggtcgtatgcgccctccgccgaaaaacccagacttccaagtcctcggcgccgaggctgaactcacgtcaagctctattaaacgtgcaatcacagatcagcacccaggaacgtgcaaatttacccaatatgactggccaaagtgatctgtagagagtatatcatcgccggaagacgtccttcgtccgctcttggcgtccgctcccaaggcttggcgccaactgccactcttattcggccatcgacaaagtcgccttgtacttagccaataactgtcattgatctctttatgatgggctaatactgacatcagaatggagctccatacggtttaggccaagttcaggaaaatattttatcacaggacgcacgcacttggcaatggtcgtggcgagtttgcagctcttataagggcaccatgaaagcagggccgtagaagactgctaaaatcaattccttttctagttcttcaaatttctcttcttctgtgatccaccgcagcccctcgtcgctatggtatcggtaataaccgcgaagtatgactggattctagcccttaccaccatcgctttcgttttcagtgccttcggcaatggtgccaacgatgtcgccaacgcctatgccacttcaattgcagcccagacgctcagcatggccacggccggtgtcctggctatattcaccgagtttattggcgcagtagccatgggcaaacgagtcaccgatacaatcaagaacggcatcatcgatatcaagcgctttgacgacaagcctggtgcgctcatgttggccatgggctgtgccgaggttggcagcgcttcgtggttgatgttcgccactcggatgggctggcctgtctcgaccacgcagactatcgtcggtgccctcattggtgttggttttgcgagcgaggcttctatcaactggggctggacaaagggcagtgtctcccaggttgccgcatcttggggtattgcccctctcgtgtcaggtgccttctcggctataatcttcggtactctgaagtacagcgtccttgaacgtcaagattccttcaaatgcggcatgcgtatgattccagtctatcttgccttgacaggagccatcctcgccctcttcatcgtcatcgaagcccccacggcaccctcattggaagagtttggtgctggcaaggcagccggcatcattgtgggtgtgttttttggctgtctcatcattgcatatgtcttcttcaggccatacttcatccgccgtctcgtccgaaacgatccccgtatcaggttctatcacatccctctcggccccctactgctgagggaaaacccaccgctatactttccaggaaagggcgatgaggccgtgattagctactatgaagatgcttacgggcaagtgcgagccggtcagaaagacgcagacaaagaaaacgtcacattgaatgcagactctgtcatgcccacgccggagattacagcaatgtccagtccggcccacataggggatgatgaggagaaggttacaccggaacctaagccacagaaaaagcacctcgaaccaacggagcggttcatcgaccctgtccgacacctatcctggacaaatcccctgaaggctctcggttatatcaaatggcttttgcttcagggcgtgacgcgtgatgtgattacacacgactcccctgaactacgagcgatccacgcacgtgctcaccggtatgacgaccgcgttgaacatctctggacatactgccaggtggtgtcggcgatgatgatgtcaattgcacacggctcgaatgatgtggccaatgccgttgggccatgggctgctgtgtatggcacgttccatgccggatatgtcgagaccaaggcacccacccctatctggttcttggttattgctggtctgctactcggtcttggattctggttttacgggtaccatatagttcgtgctctgggaaacaagatcacgcagatgtcgccgacgcgtggattcagtgttgagcttggagcagccatcaccgtgatgttggcttcaaggcttgccttgcctgtttccacgacgcagtgcttgaccgggtccgccatgggcgttgctctcatgaactatgatcttggtgctgtcaattggaagcagcttgtctttatttttggtggttgggtcttgactttgccttgtgcaggattggtttcgggactgatttgtttgatggcgttgaatgctcctcatttgtagtagtagacagatagctacctgtcatttttagttttctatcccatcctagcttattattaagctgataaactgaatctaaaaataaaaataaaataaatgcaagtatatccgagaaagaaaagacgattcatcgccggacatattcaggtttgtgcataggcgttatataattaaatcgtcacgatccagtcgaacggcgggtatccttctaaacacacaacggaggatgaccctctatttggtccgcttgtaaatcttgccaaggaaggcctcgaagacttccttcttcagacccttagactcatcgacggccgcaatcttctcgtgcagctcgccaacaaccttctcctcgtactctttgtataccttctccaattgtagttcgttgaaaagggccttgaccttggcctcctcagcagcgtccttgcggccgtaggaagcatccaggagctgacgctgctcgggagtgcagcgctggatggcctggttaacgagccaagagcacttgttgtcctggatatcggtaccgatcttgccaatgacagatgggtcaccgaagttgtcaaggtagtcatcctggatctggaagtattgccccagaggaatgaggatgtcgtgggcctgcttgagattttcctcggaagccagctgcaggtacataagagccaaagcgacaggtaggtagaagctgtagtaagctgtcttataggtgacaatgaacatgtacttctccatggagaagttgtcgaggttgacgttgtcctcgggggcggtgatgaggtcacaaagctgacccagttcagtctgccacgtggtctcgtggaagagctcgacgatgtcaatgtaggcgggatgcgagcggaagcgctgcttaaggatgaggtagatacccgcctccagcatgaaggagtcgttgatagcgatcaagccgacaccctcgtggcggtaccagcagggctggccacggcgggtaatagaggagtccatcatgtcgtcactgaccaagaagaaagcctggagtaactcagtcatccaacccaggatgctgaggtgctcgaattgctcctcggtcaggggctgcttcaggagagcacgaccggtatcagggaccgagaggccacgattgagcttaccgccaggaacattgatattaagagactagagcgcataagatggtgtcagctatgatctttctttcctcaagaataggcatcacgaggttttacttgccttctcgaaccactcgagcgcattgtcagggaggttgtagcgctttgcgtgggcaaggatatcctgggccagtgaagggaaaatagcctcgaagtcggcgcgcttggtagtagagcccatgatgacgaagtgtgtggtaaaagatgacaatgatctgacaagaaggacgaaaacattcccacttccccgcagttgtttggtttgtttggtttgtttggtttgtccggtttgctctcgttactgtttctccaggcgcaacccgaggacgacgtggatttctcaaggccattgaacgatcttcgcgttgtttcagaatctacaagcattcatagctttcccaggactcttgatacacttattgttctttccggttacgcgagttgccgtctcacctgtatcaagaacgcgacgagggccgagaccatttatttacaccggacatttgaaagtaaggattgaaccgctacgtggtgggctttctaccaaaataaggatgagattaaattgtcgcaaaacgggttgataaactgaaagctccatcggcgctacaagactgtctttgaacgttttgcctcggaacacctacctgcgacgaagacgcccgtcatggaagaacctacggatgatggaatccgagagctcatgtaccagctggaaaatgctgcaatcaagtgctctgagcgatgcctttatcaatcatcaaaatggtaacaataataagcttcattcgaacaggcctcacgtgctaatgatgttcatggactcagggccgctgaaatgcttgattccctccggcctttagatcacgaagacactgacctcgagtcaccgatggatatttcagaccctccgccagcaacaaatccttatctcaaagtgcgcgacccagttgaagctgcccttgaaacgcaagagtcctacaaatacctgctggccaaatcttatttcgatactcgtgaatatgaccgatgtgcggccgtattcctccctccgaccacaccaccagttcctttgtcaattacctctcccaactccaagccgaggccatcgcggacttcacacaagggcaaggacaaagcttcaccgtttcaaagctcaaagacccaaaagacccaaatacagcaaaatccatatccaaaactcagtcagaaatcgctcttcctcgccctgtacgcgaagtatttagcaggagagaagcgcaaggaagaggaaactgagatggtattaggtccagcagatggtgggatggcggtcaatcgagagttgtcaggtctcgctagaggcttagatgggtggctatcggaacgaaccgcacagggtttagatgaccaggggcagggatggttggagtatctctatgctgttgtcttgttaaaaggacgcaatgaggagctggcgaagaaatggctgatccgctgtgtgcatcaaaacccataccactggggtgcttggcaggaactgaacgacctcttgggcagcacggaagacgtaagttattgcattgagattctcttccgtctgtactaatttcaacagttgaaacaaatcctcgaacttctgccgcaaaacgtcatgagcttaatattctacgtctactgcagccaagagctgtaccaggccacagaagacacatatcggtcgctctccgagctacagtcaatgttcccagaaagcgcattcctcaaaacacagcacgcattgttgctatatcactcgaaaggtaactaccccggctctgcaacacgcgattactccgtgatctaatatcattcagacttcgaagaagcatctcatatctttgaaggcattcttgccacatcacctcaccgcttagacagtctagatcactactcgaacatcctttacgtgatggaccagcgacctcaacttgcgttcgtcgctcaggttgcaacggccaccgacaaattccgcccagaaacctgctgtgtcgtgggtaactactattccttgaaatccgagcatgagaaggcagtaatgtacttccggcgtgcactcacccttgaccggaacttcttatctgcctggaccctcatgggacatgaatacatcgagatgaagaatactcacaccgccattgagtcataccgtcgagccgtcgatgtcaatcgcaaagattaccgcgcctggtacggtctaggacaggcctatgaagtcttagatatgtctttctacgccctcttttactaccagcgcgctgcagcattacgtccgtacgatccaaagatgtggcaagcagtcggatcgtgctacgcaaagatgggccgagtggaacagagtattcaagctctgaagcgtgcattggtggctggatcattacagccagatgatggcgggcaatcggccactggcgcaagcgctggctctgggagtcgcaagatccttgacccagaaaccctacaccaaatcgcgacactgtacgagcgtctcggtgacgaagaggaggccgctgcatacatggaactcactcttcagcaggagtccggcgctcctgtcaatgaaaacgcagacgatgacgacacctctgtctcggagcatggcattcaaagcgatgccgagattgagcattcaggagacgaagacactgatcagtcgcaacgacatcgccgtaatcggaagcctcgcgcgaaggctgaatcactcgctatgcagaacgatgactccattgtcagtgatacctggaacggcaccggcgttacaacaactacgtccaaggcacggttgtggttggcacaatatgcgtcacggaacggtgatcttgaccgtgcagaccagctagcgagcgagttgtgtcaggatggaattgaagtggaggaggccaaggcgttgatgagggacgtacgggcgagaagggaggatgcgacctaattacattgattgaatgaaatatgtatggattatcatgacagcgaaacagccatggatttgacaagtctttatgaataatagctagaagcaaagtctgtctctgtatgaatagtcttcaggtgtggtataattgtcattcgtagaaagaaaaggggtattaattatataagatatgagccagaggtttaatcgagatatactcgcccaacacagcaatagccgtttcatcgaagctcatctcaatccatggcgtccttggtccagagaccgccgagaccggaggctctgttgtctctgtcatatcataacaatagcgatccgaatcagagcggagttcccctcttccggtggatatatcttcagaacgcttgctgagactccatgagagacagccgtagaaataatcgcgtccaatatctgtccaagtatcacgcaggcagaaacgaaggtcatctgggcgtagatcacattccaacatgctcgagcccagaaaaaatatgcttcccatggaaggcagtggacatattccagtatcaacgaaaatggaaagagtcttggcaagacggtgcatctctttccctagttgagttgctatgggatcaaacaggacaatgccaaacctggacccctgcgatgcggtataagggttggacgtttgaagggaagaagcagattcatcagagcagagacaccgaacaaattcatccaaatcgcgatcattgctgggcttttcatacatctgcgggagtgtaaaacttcccagtgatgttcccggcgtccatatggggatagttgttaaaggagattggggtggcatcttgcgtttctgcttgggcgatgtaggcaccaaaagcttgcccgaaaggggttcctgcgccccgtataatttttgagagtgttctttgcgtgcagaaatgaatttggttgcccatatgggacgtgaaaagctcgaagattcctgccatgcgatctttccatccttctggctacgatgttgacgagatgatagattttcattgtccacgagtataatgctctcaagaacagagttctcctcttccgtgggaagtgtcgtctcatcgatgtagactaaggggggcaggggatgatcatggctgtcttttatcattgaatcttcaaccagcccttctaccaatggactcgcgtccataaggctctctccaaaggtagtgacggcttggtgagcctgggatgacgggggatttgtctcatcgtcggtgtctgaacaagtcgcttctgggcttcgagatcgcacaatacattgatcaagttgacccccaaccttgaggcgtttggaccatctttcacgttcctctagttcatctgcaggcacagcccgggcatgttctgctgacagctgcagttcatagaaagaaatacactccgccagcgttcggtccgagtgtatcttcaaaatccgaggaaatcgaagtgtggagtatctcgcaccagacggtttttcaaacccactacccagcatctcgacgatgaacgggtacttgaacaatttggttgcagtggggagagcttcgtgcccgtaatcaatatgaaagcctccgaacgtttcaggttcacgtgcataaaactcgccgatttgattaagagtttgcatggtctgaatgctcatgttatgtcggttaatcacatcaacgatttgaaaatgcggcaaagcatcgccctctttgacccgatctggattcagaagacagccaacaaaaaagtgtgtccatttcagccctttgatttgtcgcagatcagaagcatctcgcgcgttgtagctagctccgatcaacgcaaggtctaatgtgtctccaagacccggtatataatctttcttgagtttgatccatcggccaaacatatggtctacaccagtagagtatatcggaaaatagggctcgtcggaagccttcaagacatatccttcccaacgtttagcgattgctttctcaaaactcttttcgagccgatggtagctatcagctcggttgaagtccagaacttcctgataggcgagatccgctcggcccggaattgttttcaccactttctgtaagagcagtcgtctttcccgatggggcttggcaaggcatacgtcgtcatcgaggagaagaatgtcaaagaacatgatcatcaagtgctcgtacggttgtggcctgtatcaatcagcaaaaagacttatcattttatagaagtggtgatttacggagaatcattatcaacgccaatcatggtgccagatcttggaataaacctccgaattttgttgaaatccatcacttgaccactctggtcattccacacaagcagttctccctcaacaatacagcgggacgtaaattcgcagccaggcaatccagtgcggagcgattcttctatcacaggtatgatcttatctttatctgcggtcgaatccttgccacttttcgagaaaatctgaatgggcgtatatttgttagagagatcgacgtggatctgacagtattcaccatcgtatttccgttcgatgctcattcgacgaccgttgaccatttggtgacaatgtttgatacttcgagctttgtaataatcaggtcgtccaaccttgataccaggacgagggcgcatatgctgtagggcaattgcgttcagacttctggctgtttggggatccgggtttggagggaaattgtttattgggtccgaggcaagcatctccagcgccccttcgaaagagttctgaagctggagtaattgcggaagaagaaaatggaatttcttcagagtatagttttgtgggaaaacgaccggagagtagcttttgagaatcatgcgagtgagccatttcgcgtcccggctactcaatcgacggtacagttttgatagagtttcttcaacgtctacagctgtacgggtccggcgaacttgagggccagagaagcggcaacgcgatgcaattctcaccatggcacgatcgatttcttctaccgataactcctggcccgctgggatgtaattctcggcctgccgcatgacagtttcgacacatgctccgagatcaaaaccaccaggactttgccatcgattcagttcagaaagccgcgatgatcccaagcctaagcagcgcccgatgactcttgatagctgcattgcttgcaaccagtatactcggtccgttcgtttttcggggaacatgcaggtaagcaacgccaccctgtctgttttggcatcatggatggttcgttcgtgtcgagcgaaccactgggcgactgttttaatgtcaggattctggttcctggccgccgtggatgccttggccgttttgctattgtctaggttggacagcagatcacacaagagggtgaatttgaagcccatgacccatatctacgcgagttaactagtaactctgcataaaaccgtggaataatttgagatacagtcaaggaggtcaaaactcgcgactcccgaggtcgagactttggccgcgctgtccgaacgcgaaaagaggaaagaagatgacacgtgagcacgtgaccactttagccccattatatggagaaaatggagaaataggtgagtccttgtgattttgagggtatttagagtatccaggtgcgtgatctgccggaaatagaaggccaccatatttgatatcgagtagcgaacagttaaaatagcctcgaatcgatccattgccccgtagtcaaagcaaatgcgatgaggagcatttgtgcgatagctcttcatatctaggaatcatttcaaagagcatctcagtgaactctgaagactcatctctccgtggattaagtgccgcaaactcaaacccttctagatatatcccagcatctccccagtcaatcagccagactttgccctcggaacccaggatcaagttgcggggtgctatatcatagtgggtgagagttaacttgttgaaaaaaacggtttagtatcaggtggtgcgcgatgaaattgttgggtgatctcaagtcgccgattgaaccaggcctgtagttgctctgtcgagctgaatgggccagcccccgcgtctggaaaatggcaaccacgaaagaaacaggttatgcagcctactagggctggtagttgctcttgttctttgggtatggggataaggtgtagattgttgatgattgaagcagctttagagacgacgtccttgcgttcaatcggacttaggtcttcccagcaatccttaactgttctaccgcccacaaagtccatgactatcaggcatctagccccaaagaagagatcttccgtttggatactcaacactcgatggactttgggcactgggattgatggtatttctcccctctccccagccttcgcaatgaggtcaaggatattggcctcacctggtcgtgagcttatccctcctttaataatcaatgttcgtgacaagcgcacaatccgtgtcccttggcagttatgaagaattggtgctgtgttgaagagttgggtcagggtttcatctgaaacaagggaaacgtcaacgccatcgagggggtatttttcaggttctgggccttttctgctgacaggctaagagaaacattttgttagcttgaaataaccgtgtagggagacggattctcccacttcatatatgtcagaggtaacaagtccatattatcaccaagcggggtagacgcctagaacaagcaccagatcggcataggggatatagggctacttgtagaagaaaacagaactaccagatatataacaatgaggttataacatatggttaaatgagaaatatgacttgaagatgtgaagatatgaagagtgggaagctgcatgggctccgtacccacgtgagcacctcctagtacataagagagaaagtgaatatacaaacatcgtcgtgttagttatgtagaatctattcaaggatttagatgaatccacattttagtccctactatcatgctccctttgttctactatttaccgctcactttctccgcttgctatcgtgtatagaccaataaccttgttatcttattagatgagcaatatgcttgggtacctacatggatgtaagtataataggcagctagcactagtacccagccatgaatcagtccagagagcacaactttcctctttcccctcaacttgccctataaacttgtgcccactctctatctcctgtgaaaatgagtccttagtctcgtcagatcgaagctaattatagatgacattgtagcgaacctcctttctctagaatgtatcaccaagtgccctcttttcaacctgtgcgatttatcccctcggctgaaaaggaagacatgctgaatagcactgtgctatttctctacgctgttggccatcagccactttccgagggaggcagcctctggtgcctgtacatagatgttggcgatggcagattagtgtgtattgacgctacgccatcctagaacgttcctgccatcaaaatgccgggtggatcgaaggcctttatgcttattagccttttaccatacatctacctctactcttgatgaaatccgtcatacggtcaataactacgttgtccaaatacaagtcttagaaacaggatttctacttgtatcagggaactcctaacacagctacgggatctcgccgtcctccctatcgcccttacccaccaggatctcgctccattcaattacctcatcgaagagtccacgggccgggttcgagctgtactcgactgggatggtgctttatacctcccagttgggtcaaatttccattttatggataatctatttgggttcatgaccccaaaagtggctggcatgacacggaggatcgtcaggaactcgagacagcgttttaccatcgggctctggctagtctgctactcagggacttgggggaataacaagagagcaactggagtcgcagaaggcgatcgggatgttacggtacggcgtggagcggcttctcaggttgaaagacgaacaatccgagcactatctagatggttaccttcgggggttatcgtatagctgggtatctagatggaagcttgatgatacagttagtaaagcaatatgcagtggcatgtcattaacgtatagagccgagagttgatgatatggtatgtatggctttcccatcatttgtgaacacaagggctttagaccccagtttctggatatcaaattcaaggattgtaactgggagattggatcatctcactcttgatcttgaaagttgcttactaggcgtagcatggaaggtaaatcgaggaactaaagaggccttacctacggctggttgccatctgctattttaatcgagtgaaagatacggagtatgtaaaggttagatcttcaagagccaattcaaaggcacagctggcagtctaacttcactatagcactggcggctggagaatgcagttgtaataaaaaaattggatgttttattcataacagtaagtttgtggtagaatgagataacaggagcccatgagctaattcaaacctgaaaatggggttgaagactatgcattcgccgaacaccgagccatttgtatgaaatcaaggacgccattgtggaacaaaaaaggaggaacataaagccctctccctttagagaataccctgcttttgcaaatccaagtagatcctttcgggcataacgttaccctctgcatcctccatctgaacgacattatcccgtgaatctctgtccttcttccgatccttttcgagctgatcccaaagcgccatagcctcattgatactggtgatctcacggaagagattggtgttggaggtaatgccgagacactttaatccgtggacgtggaggttttcagagaagtgtttgtcgaatgctcgtcgacccatgtaggtgtagtttccgcaaatctcgcactgatattcgacaccgaggccatggagcttgtagagccagaatggaataggttttccatcccatgccagtggcaatttcaatgggttgtagataacctcctcgtcctcttcatctgattcttcgccggcacgaggctcgggacctgtgtgatcgagcccagcctgcacagcttcccattccatttggcgttcacgttcagtcataccctgtcggcgctcaacattgattcgtgtcgcctgtcgctgctcgcgcagaacattcgccaaggatcgaacttgatgttcgcgtcgtgcaacttcgcgctccttgaggctatgggccgaagatgtgccttgagatgctgatggtttctcgttggatgcgcctgctgctttgcgggcttctgccgcccgaatatgtttcttgccggtcaagtggctccggaggacgttctcattcttaaattccttctcgcaatctgcgcaccaaataccctcaccggtcccttcggtagctgggccagacgcaccatttgcagacttttcatctgtccaaccgggaacctccttcgcaacccattgtttttcgaattcgtcgtcgaagctggcgaaaagctcgttcaagggttgcagtggctgaactctcttgatgaaactctccagatagctagcaagctcgccaacatagttgaaataacgatcagagagcttgtctttccgcttaattggcaaaacaggggatgtgaagcagtcgaagatatcgaggtattggacgtatgacaagcgcttaaccccgggaagattcaggtaatcttcgtgaatagttgtgagatccagatactgcccaaagccttcttcgccagtgaacatattatcgattgcggtgcggggagcctctccttcgccggtctgacggcgattatatgcttgctcgaggttctcggttggttcgttcgggtagcgcttgtggtgctctttaatttcccctagctgcttgtaaaattcttcgaattgatcgcctgtcgagatagactgcacttccttctgccgcaatccatcggcgtcccggtagatctctaagagtcgctgggactgactctcaattctgtctaggaactgggagacttcatggtcgcgagccaagtggcctcgagcctgattaatcggtatatgagaaagtgtgactggcaattttgggcggtatactcacatttcggggctcttccgccacgcgatcagcgatagcctgttctagccgctctagatcctcgtggatgaacctttgatcttcgagcaacatattttcaatatgactgctgcgcaagaaaagctttttatcggcgcgcaaagtgtgttgacaaagttgcgtggcgatcgcaaaagacgttgacatttggcagctccaacttgcgggaaggtcatgtgactcgaacctttccaccgcgaaaagttaggccggttgacctcactcacgtaaggcttcactcttcgtgaattccgataccatttattatctgccgttgaaatactcacacttacatcatggcggatggaatcgacagacgcgccgagggtatgtggttctaacattgggacaacatgaagcatgctaacagcaactagagcgcatggaattcaacacctccaaggaggtgacggtcgcgccgaccttcgaggacatgcatttgaaggaaagcctgcttcgtggagtgtacgcttatggatacgaatcgccgtcggctgtgcaatcccgtgcgattgttcaaatctgcaaaggtcgcgacacgattgcccaggcccagtccggtactggtaaaactgccacattcgcgatcagtactctgcagatcattgatactgttgtgcgcgagacccaaggtatgtaccactctgtctaatctgatcagatccagacctaaccacgatccggtttgtaacagctctggtcctgtccccgactcgtgaactcgcaacccaaattcaatccgtcattatggcccttggtgattacatgaacgttcagtgtcacgcttgtatcggaggaaccaatgttggcgaagatatccgcaaactcgagtacggccaacacgttgtctctggaactcctggtcgtgtagccgatatgattcgtcgccgaaacctgcgcacacgtcatatcaagatgctcgttctcgatgaggctgacgagctcctcaatcgcggtttccgtgagcagatttacgatgtttaccgttacctgccccccgcgacgcaggtcgtcgtggtctcagccaccctcccatacgatgtcttggacatgaccaccaagttcatgactgaccccgtccgtgtcctggtcaagcgtgacgagttgacactagagggcatcaagcaatacttcatcgccgtcgagaaagaggaatggaagttcgacacactttgcgatctgtacgacaccttgactatcacccaggccgttatcttctgcaacactcgccgaaaggtcgactggcttgccgacaagatgcgtgaggccaatttcaccgtctctagtatgcacggcgagatgcctcagaaagagcgtgatagtattatgcaagacttccgtcagggtaattcccgtgtcctcatttctactgatgtctgggcccgtggtatcgatgtccaacaagtctctcttgttatcaactacgatctgcctaccaaccgtgagaactacattcaccgtatcggtcgatctggacgattcggccgcaagggtgtggccatcaactttgtcaccaccgatgatgtccgcattcttcgcgacatcgagttgtactactcgactcaaattgatgagatgccaatgaatggtaagccacgcagctataatatttctattgctatgctaacaatgttattgcagttgcggacttgctttcataatccccactgtctgatattgtgattataacatcttttcctacgccaaaaagcgacttggcttcattccttctggggtcttctgcaaatcgggtgcgcttgtattgttgattgaatatgactcggaattcggcacaatcggtttgaggaaaatacaaggccagctctagcgtggaggaaagggataataacatatttcagtaagtcgaatttggaacttgctaccattcactcaacaaaactaacaatccgaggtagttttcaagaatgccaaccgattcgcacaccctaggaggtgtttacgattttgcttatttctaaaatttcgggcctcggcctaagtagcagggactttttttgacttcggagtttctttttttattactttttgacataggaatcatgaatgatggatttgttttactttcgtacaatgtgcctctacttcttggccccaagtctctcgtctggcgacttaaattcaccagtgagatacctaccacgcgtcaacttctgttgctccatggttacgctagttaattcctactagagcgaacctctactagaaaatagtgtgaatggtaaatttgatttaaagattgggagcaaaacaagccaagccccccccccccaaagaaaaccccaactcagaactggaccaaaaaaaaggacacaacatatatacttctcagaacccagaacccagaaagaagatacggaccaacgccagcttcctgtattaaagaaatagatgctagctgcagagcgtaaacagcatagggagtgaaaggggaattcaaacgatgtatatgcgcaagacagaatgaggatatgacgggcagttgatgaggggagagagaagaacacagaagagaattcatgaagaacaagaaaacattgcgaaacagcaggtttatcatctttcaatccaaagctccaagtatgttccctcaatcaggtacggtatcgcggaacctaaataaagacaggcaacgagcgtgaacagaactggtttcgtggtagtcattgtcgatgtggatatcagaaagtggatgtcgtcctcaatgcgctagtccgcgtgaagccatttgagggtaacccgctgcgttgaactggtcctgttggacgggatcgattgctctctcgagaccagctggaagttcgagttagcggtgctgttcaatgtgagacgaggatgagagggattcttacatccttactgcattatcgtcgcctgcagatgcgaacattcccgggtctgctgggttccatgatattgagttcacgcatccggagatatgcccctccagagtctctacgatgttgccattttctttgtgccagatgtagactttcgagtctggagatagttagcagcgataccagaaatgacattttgaggtactcaccttcacttccgctgacgacaaaattctcggctgctcctccgaacgtgctgcgaatcacgaactcaccttgcttctgtcccttgaactgtcggacaagcgcagtggtttccatgtcaactagttggatctcgccctcagccagattaataagcacatgccgcgagtctttgctgatagcaaccgaggtcggtttgctcggcagtgggagacagtagtcttcttcatatgtaagcatgttgtacacatgaatcttctcttctgtgtcggcagcgacaaggcgtcgtccatcagggctaatggcacagtcctgtacacggaatccgcctttccacgtgtatagagactgaccgcgcatgctccagtgacggagctgtgattcggcatcgagagaggctgtcacaaaagattcaccatctggtgcccaggcagctgcagtcaccggttgacggtggtggttgatggtgagcagacaacgaccgctctaaaccatgcacagcccgagttagtatatcattatggatttacatgagatttaaggaatcattacctcaacgctccatacgcgtgccttcttatcttgcgagcaagtaattagttttgagtcatctggactccaactggcaaacgcaactccgtcctcgtgttccgtgagtctgtgaagaacactgaagtcggctgtgttgtagatcagcacgttatggtccttgccagcagtaaccagcttagatccatcgtgagaaaactcgcaataccatacttcatctgaatgctgagtcaagtccacaatgacatctaaagggaagtcatttcggtcgcacatatggtcagagtagagcgacggaggctccgcggtattgtgatagaagcagttgttgatttgagtccgcttgacgtgatctagtaagatagccaggcggtgttgcgggatcattacagaaggagaaatggattctgcggctaaaattagcaccccggttacaccacagacattaggcattagattagactcacttgacaactcgccaagcagtcgttcacgagacgaggtaacagagccatcccatccagtttgagtatgtaagacttcggttgagcacataagaagactaaccaagataaatggtaagcaaatcgggttctagaaatatctatagatcggcaataccttgatagggcgtgtagacgttcaacatcaaaattcaagggcgtcagttcttggcgaaggacgttgagagctgcagctagatcacgcgcttctagcatctcgaggaatttctgttgtcggagatagaatagcatctcgttcttatcggcctcctctgctaataccaacgtctcctcttgtgaagacttcctgtcgacctgttgtgacccggcatttcgaaacgactgaatcaagattctctcggcctctggccatcttccgcccaacaccgcatttcggaacgttgcgacccccgacgtctccagttcatagccgctctccgagcttaacagggatgccgactcattataacccagctcatatagactctgtatcaaaatccgcgtcacctcctcccggttatggccatagtaagtcgaagactgggatggccttttagagccatttgcgtgagagctcccgttggttgccgcttgtccgttcaaaccagccttcctcgatgatgcaagtgattcgttcgaggcatctacgaagccattttctgttgatgttccgtcgggacgcatgattaccaggcgcctgcgcttgggggaaggagatcggtcgtccggtcggccaagacgatgactggggtgattctgagaaacagtatcacgtgctatttgtggaaggtttccggtccccgccgatgagggaccaacgttatccgggctgctcgaaagacggcggcgacggttaggccgaggggtagatgagctgggtggttgagatgcggcggacaggagctctgacgtttgggaaccgggattgcctaccgaggcgggagctgtattgacgggtaaaggaggatcagggtggtcggaggtgatatagggatgatgcggtgatgaattgtgagccagttcgacagtatctttagatctgcccaatctcctggttctttgaaagaaccaggtgagcagacctcaagcggtggcgggttgtccgataagtaatcgccgggagctccgtcgaggaggggcgatgcagctgtcacaaggtcaaatggacggtcactagctcgagctaatagtcatagatgtagcaaatgatcaaagagctgtagatcttgcgaaatcacgcggttgtgatgttctccgctttgattgggaactggttggggcttatcggtggaagagagaactgccagtctgagaaagcaaagtctgaatattgatgtggaatgtcaagttatcagatgtcaaatgtcggatgttaaatttcgaatggttgaaagtgcagaaaataaaaaagaggattgggtacgcgcggaaaaggtcgacgatctactccgtacatagagcgtaacaccttatgtgctcccttactatatgagtacaggtatagatatatttgtacgacagtaaaacatatgaactaattgaatattcgttgaagtactcatatacaacatatatcatacatctaatctatacctccgcctctaccttcctcgcctattagctgtcatgtttcccatgtttaccccaagagactggagtcactatccttaaaggataccttagatagaagatgggagatggagaaaggttatataggtaagatatttttcgttgaggaaggtgccctgcctatttgggaagggacactcccccattgttgatcgtcatgtggacatatatgatgccttatacagtcagtccagtagctacttcatcaagcaactactgtcaacaagaaaatcggtctatacgcttgagtatcttcgaatgaaaacaagattgcttgctcatagcgagctccccgatctagcgccgtttttcccttagaaagagcgttacgagcaatataccaatatgagatagctatgaaagctcctctaccaatctacctcgagagctatacaggcttaataagcaatacaaagcacctagttaggcacttagactagttagctttggaatcgccgaagtatacgtgtgtggtcagtagaattctacctccatatttccatcaaaatgttctgcaaacaaccaatgtcttctcattcgtccattctttcttattttccgctctcttggcgtacactatatatcgtgttacttttccgcaacgacgttcttccgatcattgatacacagacgtcaatgatacttacattctgctatatatattgccggatgtagggtagttatccatatagacagattactactccattacataattcctgtagtaaaagctgccttggtttctccactgacgccatgatgatgatgccagtcatgcggatatataatcctcttattttgcgctcaatctccaaggtcctcttcatcaccactattcctatacttctacttcctacaaatactattaactaccttccaacttattccacatcttttcatcatgggttgtggttgcggatctaactgcaactgtaccggcggtgcccagagctgctcctgtggcgacaactgtaactgcaagggatgcggagtacgtgatatcctcataaccttggaatgtttcatgttcaaagactaactcagctgtctaatcttagaagtaaattatttccccacgtctccgactccaatgatgaatatggtgatgatttgacgcaaggaatcaaagttcatagagattaaattcgatctctcaaatcaaaaatgtactcccaagtctttttcgtgacatgtagatctcatcgtttctctttcaacactgcctcggaagctttaagcgctcccgtaatactaaaacatataaatggcgacaacgcatacatgatctatagatatagtcagcgaaatatcttttccccgtaaagccacgtaccgtcaacgttttcgcaataaccatcttttccatctcagacgcctgcgccaattccaccaaccccgaaatcaccagcgccgggggaccagcaggcatcagcatcatactaaaccagagcattggatcatcaccaaggagacgagtcctcttagcaagtccataaatcagtgaaatacttagtgccggccagatcaccaaacgaacaacaaagatagtggtgatagccttgatggggatacgggccgaattcccttctgcaaccgtccgctcgaacgtgaccccaagcctacacccaaccatgaagatttgcagcgttgtaaacagcccgccgatgttgctcacacttgcagtcagccacgcggtgaatatcccgccatcatcttcatcattgaagaatgcccggtgcaacgcggggactagacccagcaccgtaccgacaatcatgcagattattgccacgtctgctaatggatactcgaagggtgcgagtagttcttgcttgactcggtgcgggaataatgagcccagccagtgcgtcgacctccgaatcaggttcccagctgatgttcgggcttgttgggcgcgctgcgggagcaatgaggtttcttcggtgagttgctcgtcctgtgctaggatatggtgtcgctcctctgagctactaagaccgtctccacgatcttgtaacatcctcggtccgacgacataggcgatggtcttgctgatcaccccgcaaacaaggaagtaactctgagcacgggagattgccgatgatgtggtttcaccatgtcgtaggatcagttttaaaattcctacactcccaagagagtgaagaagtaacaagggtagagacgtagtgttgttgaacgagcaagccggtgtaacccattgaggtaggccaagcagatatgacgataaatggccgagactaatggatgcagatgtgtagagaactgaccagactagtaatagatggatgcgataggttactgttagttatgctgggttcaacaagagtcgccatgatatacttatgactgggatatagttcatcgctgtctggagatgaagctgctcgccaagattcacgatgagtagtgccggtaggaggagtttcatgcctaatcccaacatgtcattgattgtagtctcctggagcaaatggagccgacgagcagcaaaaccatagcccattgttaacagcacggaaacacaggcttgtagtgcacccaggaagggtgttactaagccttcgctggacatatttgctttttgaatcgctggcgctatcagctaactatgttttcgtcttcaaaaacttataattctaatggccgtggcgtcatggtgaccgagttaactacaaatttaccaaaaccgctcgacattgtatgagcattcgactatcccaaggacatagttccgatatatattatatatatatcatccacactagaaaatattcgggccttcgggggagtctatcaccgagcacggggattccccgtagggtgcttgctatagttaagagacgatagccctaattgggctgcatcttccttctccaaaagcctcaatcacttcaagtggactttaatcacgcgatactttgcagtctatataccatagatacaagcccaataaatataatactaataacacttctccaaattggcccgttcaaacgtgtggggggcctcgggtaatcggtcggaggaaggccgagttgtcctctcagcgcaagaacataaagaacatcgttagaaagaaaggacagtctttctactcttcatctatcacacaaatccttctcggtcttaaacaatgtcttccatcatactccgctcagctttggaaaccacgccagtggcatacggcttctggttaacgtatgtttacaccccgcatttggagaggggcatcaccatcccccgctgctcttctcaacctcaaagctgtatccaacaagaggaaaaggaatcaagctaactggccttctaccacagcctccccagtgccgccgtcgcaaagacaattctccgccgcagtcccgagttctcggaaggtggattcagctgggttctagttgacgctgaacatggattgattaccgacacccactattatgaggtttgtcattcgagtgaattgaactcgagaatttattattgacaatcacatctagctcactaatgccgtcggccacgagggtgctagtcctattatccgtgtgccctggcccgaagagtggatgatcaagcgtgctctcgatgccggcgcccacggagtcatgactcctatgtgtcactctgcagtatgtgtaacccggaccgctgcgttcgcacttttctctttatctgtcggatctgtatctcaaatgctaacacccgcttttctgcgtctaataggaggacgctgccaaggtcgttagctactgcaagtacccgcctgtcggagtccgtggatacgggcctatgtttacgccgcattcatttcccggcgtgaagcccgccgactatgacgacaagacgcacggtgaagtcctcgttattgtgcagattgagtcgcggccgggtgttgagaatgtagaggagattgctaaagtcgagggacttgatgttttgtttattggtgagattggacctttctgtttatggtttgtggaattggctaacgggtttttcctaggacccttcgaccttgctaagcagatgcgtgtcacccgcggtggcgaggagcacgaggctgctatccaacgtgtcttgaatgctgctagagctgcaggaaaaaaggctgctatcttctgtatgtgttctcatttccgatgttccatggctcatgtctaatattgcgttttttaggctccgatggtgatgatgctcttcgccgcacacagcagggctttgatatggtttccattaccaccgatgttgctgtcttcggtgacgggatgctcaacgaattagagaaggctaagggcacttctaaggtccaaggaaagcgggacgggtattgaactgtttcggaattatattgattatgtgtacatataatccacgcaataaattcaactatattatcattctacactgtaaaacgattgctctcctccattacctattattcaaacttccaataaagctttggcttggtcacttctttgtcatcttcactctgtaggcacctggtgtcaccgacttgacagttccattttgctcgacgtcaaaaacgaaaagcgaggtagcaataccaccccaggtcaactggtccagcatagtccagtcgttaagatcgtagaacgaagagaaaagacttgaagaggaaccaactccgggattccgaccctgagttgcagtatatccccggaaagcgatttccccactggcctgttcggagataatagacggcacaagtcgtgacccgacaccaccaaggagtgtagacactagagccgtgatatctgtcccattgctaatccacgaagtgatattcaaaccaggcgcgggctgggtaggtggcacaacagcgagtgtcaatgacgaattcaggtcttcggctttgtatgtgccggcgaacttctgcactgcctctgctgcggcttgctccataagcgccgggagtatagcatcgacaataaggtcgatcgccaagagcgcctcgctgctgcggctggattgcgtgctggctgagaggagagtgaagccggcgtcgaagtccggtatcacgaccacgatgccaccgtagtatcctgagtctccgagtttcgtgtatagatcagtgaccacgcctgatcccgcgtggacgtatcgatggatctcccatggtgagccgaccgagtagcgtaaacttgaggtgtgagtgattggcttcatccattcccgtgtcttttcggatggaaggagggtggaattcaagagggctacaccaagcttggaaagatcattgattgtagagaataatccaccagagggggttgtagcgcctccatcagggatgaactgctcatcaagagcctccgatgtgacggaatgagggcgggtggagttgccaggggttgacgagtaagtggacttcaatcccagaggttcgaagatcgattcactataccattcgtccatggtctttcccgtgagatttgaaatcgcgagaccgaggaagatatagccgccatttgcatactcggggctcgtccagggaaggtaaactgggggccttggggcgtatgccacatcccaagagactggattgcagccctgggtctgttcacccaagcaagatggccataaggatatgtcactcccgttcagcggtgggagaccgtagaagtttggatcagtcaacgcgggattgtgagagtgttcgagatacttgtatagaagaaaggtttgtaggaattcttctgtagcaccatggggtatgccgctcatctgacccgcaagggatttgagggtgactttgtcccattggacatcataaacaagccggaacttgtcatgttgcttccgaacacgctcggccaagaatgggaagatgtcggtaagtggacggtcccagtcccgaggtttcagctctataagtccagcaaggactgtgaagagtttcgacacactggcgaccttgtaaatgctgtttccatccaccttatttaccccaaccggggagtttgctacctcactggcggtgtgatgtaattgaagatctttggctttcgggtcaagcgtggaaaataacccagcagagaatgtgaggttcttcagcgcaaagactccactgcttttgttggcctggttatcggcgaggacggtgttgagttgagaagttaggttcttccaactggcggcgactcgactgtgattgctagacaagtccctaggaggtgggtatgacggtcctagaaggttggcaaaagccgctgccgggaggcaaagcaagccggtgagcacgtaattcggtcgcatggtgcttatgagaaagaattgctgaattattccaaaaagtaggttgatgaattagattgaaatttcaacgaatgctgcacgtcggcctggtcttatacctccttcaaactgccatcgaataaggcgctacgttcattctccatacaaggttatgtcatatttagctccgtgatatactacctgggggccatcaaccaggatctcaatctattggtgcatccatgtcgtggggtacctcgatttggtccgttgtaccgctctgctggggcaatgacacgatgagccgctctagtttgctgcgttgaaccatttctggaagccttgattgatgatccttgaggcggtgtcattgtcaattctatcgatatatgggtgttcttcagcaatacgaaccttcgtgctcagccaaagccactgacatcgcgatgcatagggacactaaacccgatcgggtggcatgcggcgctctatgtcttggcatttatgcttcgatgactacgcggaaaccgacctgttgcaacgtgccgacgcatgtcttgcccaccaaaaagatcacggtcatcacaataaacatccagataggcttggttgagtcgtcatgtacatccccgacccaactgcccatgtggtgcttgcgttgttcagcgccattgttggttgagaagaagcagtcaaaggaccaaaatcgagagttccagtagaattatcatgcgattttctctggtaggagtttaagatggtgtgaagaggttgaaaaagcaagagaatggatgtggcctggatagctttcctatttaggcagtcacgagctgagcacatacttacggcaagtaccggttctttcaaagttccctgcgtatccattatgctaggaacatttttggtgtcttatttcttatcttattgctggtaacttaaagggcgattcgaattataacacgggaccgctctcacgcgcttgcgtttgcccctagttttcgcggtggcaaagatgccggattatccatagagcacatttcagtagcactctcatcaatgataccttcacaggtcgggtcgtcatagcttgttaaaggaatggacttgacgaggcatgggcgttttggatgcacgttagaagatttggtgtagcgtgaattcagtcagattagttattcatttgctatgagactgtcagggccagttgagcgagtagctatgtgggacttggagggaccaattattcagtaatattcagtaaagaagaagggagagatctctaagattggaacatactttggggtgttggaggtcgcctctgcagtctcacaatagctcctttattgattgcatcacataattgtagaagatatcggagaactttcttgttctcatctttctccttgatctataacagatcgagaacagccaacatctattgattaatatcaactctctgaccggcgacatcacatgagagtagaatgcaggctttgaagtgatgttgttttggctcaatacgacgaaagtagcgcgagtgagagtgggcgttcctagagaggacatgtgaagccactatcattatcgaccccggatttgtatgatgtctgtcaagtgtcgattggacgatatgtattagctgctcacatgttgaccgtctatttgagactttgagccatgtcacattatatgacccagtggtcccatgcaggccctactacttactcctttgcctaggctctggtttcaagttatcatatatggccttaatatctagtaacacccaagtgacactatattctaagctttgaatctaagctttgctaagcctttgttgtgctaagaccttgtatgctgcctttgaccgcccctctatacgcccgacatcctttgatcctttcaggtttcatcggtgctccccaaaagcacggtttgaataatggcctcttataggagttgctgttcagactataaaggctgctgttttcgtccgtagacaacgatttctacacaaccttcaaaccctttcgccacaggtcaccactagccatggagccaagaccaaccatcaaattcaagttgaatggagtattgagatctggggctgaaatcgatgacttggaactccaagcttgctatcgcgctctcgacaacctgcggagcttattgtttcaagcaccgatgctggaccttctgagagagcaaatcaaggaaggagaccgctatttcgaatcgctgattcgagcctctcgggggaaattcagagaatgcagaacatttatgaaagtggccggtgtctcggcgacagagttgagaacactctgcaaccgctggcaactctccaaacccctcgaagacatggcacgaaggattgtattcccaacgcacccagagaactatgcgattatgcattccccaggagctcccgtcagaagtgggccagactgtggggtggaggtcatcggggaccacatggcgaaggttcgatttgtggatctcatggtaagcggagagattcccaggtggatgtcggcgcagcgagatgacagttatgaaatggcggagtacttggtcgcgaaacttgagagtgggagcaagtttttctatattatgaacgaattcatggataccgagggtggttgcaggatcaagctgcgggcctttttcccctctgcttcgccatggtcattgatcaatcaacacgccgagcatcttgcggtcgagtttcgaaatcttctccgaatcgtccatgagacccttgaggaacttgaagacagctattgaccctttcccgaccgagacagacatcatcatcgccggacattagtacatatcatggattattccaagtcgtcagttttgtttctcatatagttttctgcaatattagcattattggattgatttccatggttgttccaggtcattatgggggagacgcagtagctcatcgaacttgtaagacgaaccagatccctgttcagtgattcaagtagttctcaaaaaccgcagtaacagccaagcagaaatacttctaacattgtgagaccgataaaaaaagccaccagaagtacagccaagctgaaggatcggctttgcatggccacaattcggtccgcggggaagagaccgaggattggacgattagatcaggggaactccacgacctttgagaatcagactcagttttcaacacctgtaacttgcagtccaaagcgaatgctaggcttgggacgtcctctattgaaagcgcgggcatcattgttggatctgataaccgcaaagaatacgttgacacagccatcaccgcccgccgagctgccaccgcttccagactcgccctcctcaactaccttcacccactctgtgtctacccattccacacagtcttcttccattatgacttcagacgattctgagaaccatggctcgatcttttcggtctccggccctgtcgtcgtggccgagcatatgatcggttgtgccatgtacgagttggtaggcagccccagctccgagatggtggagaaccccagatactgaccgcatagtgtcgtgtcggtcatgacctgcttgttggtgaggttattcgcattgagcaagacaaggccacgattcaggtctacgaggaaacaggtagagctccgcagcccccgtttgatcataccccctcagagagctatgctgaccgatgtcatctttgaataacagccggtttgactgttggagacccggttcaaaggacaggaaagcccctttcagtcgagcttggccccggtctgatggagacgatctacgacggtattcagcgacccctcaaagccatcgcggaccaatcgaagagtatctacattccccgtggtatttcggtcaatgccctggaccgggagcgcaagtgggaattcaagcctactaccttcaaggtcggcgaccacatcactggtggtgacatctggggtagcgtgttcgagaatagtctggtgaacgaccacaagatcctgctgcctcctcgtgcacggggtaccattacccggattgctcctgctggcagctacaccgtcgaagagaagctgctcgaggtggagtttgatggtaaaaagtccgagttcggtatgatgcagacctggcccgtccgtgttccccgcccggttagcgacaggctgtccgccgatgcgcccttcattgtcggccagagagtgttggatgccctcttccccagtgttcagggtggtactgtctgcattcctggtgccttcggttgtggaaagactgttatttcccagagtgtgtccaagttctcgaacagtgatatcatcgtctacgttggctgtggtgagcgtggtaacgagatggccgaagtcttgatggatttccccgaagtacatgcccttcccaaacttactgcgataacatgttactgactgcatttctttcccagctttctattaccgtcgaaggccgcaaggagcctatcatgaagcgtacctgtctgatcgccaacacctccaacatgcccgtcgccgcccgtgaagcctctatctataccggtatcactatcgccgaatacttccgtgatcagggtaaggacgtggctatgatggccgattccagttcccgttgggctgaggctctgcgtgagatctcgggtcgtctgggtgagatgcctgctgatcagggtttccctgcgtacctgggagccaagctcgcctctttctacgagcgtgctggcaagagcagtgctcttggcagtcccgagcgtgtaggcagtgtcagcattgtcggtgctgtcagcccgcccggtggtgatttctccgatcccgtcaccagcagtaccctgggtattgtccaggtgttctggggtctcgacaagaagctggcgcagcgcaagcatttcccttcggtcaatacctccatctcctacagcaagtacaacgcagttttggataagtactacgagaaggaccacccggaattcccccgtctgcgcgatcagattcgtgagcttttggccaagtccgaggaactggaccaggttgtccagctggtcggtaaagcggcactgggtgattcggataagatcacgctggacgtggccagcttgctcaaggatgatttcctccagcagaacggatacagtgactacgatcagttctgccccttgtggaagaccgagtacatgatgaaggcgtttatgggctaccacaacgaggcccaaaaggccattgctcagggtcagaattggaacaaggtccgtgaggctactgctgatatccaaagtgctctgcgcggcatgaagttcgaggttccggaggacgaggcggaggtttcggccaagtacgagaagatcctccagtccatgactgagcgattcgcttcggtctcggacgagtgaaagtgacatcttaacttagcacgtatttccttttagatgtttgttcgagcacattcccctgtagttattgtgtccaactcgagttactttttttccattatggttgcttaacggtataacttctagatgtacatgtggcccgtacgcgtcaggcagcacaagacatgcgcacatgacccaatatcggatctgttaggttatttggcatgttgaaatagtctctttctttaggatatccggcttataacactatatacactattcttcactcgtcagtactttgattgtagcctaggccgacagaccgggacgccactacatcaccgccttcgtgagccaaacaatccctccacttacaccgtgcacctccccggttctacttcattcgacttctctgttgcctcgtttttcttgctttttccatattccttgcctagaagcagttttccgtatcccaaatcgccagccatggcaagccccacgaccggccactcgtgcgcaaacccctgtccctttcctatgcggtctggctaatctccgtgcagcataaatgtcaatgaccccagcttgatttcgctggtgaacaagcttcaagatgtcttttccacagtcggtgtatgtatacttgatcagaggtcacagatcaattgtgattacaggggcaccatgtgcgctaacaccgctactcgttttaggtgcacaacccaatcgatctgccccaaattgccgttgtcgggtcgcaatctagcggaaagagttcggtgctagagaatatcgtcggccgggatttgtatgttgcttgttttggggagcttgcgcggccccgtgcacgccctcggtggcggggcatgcgccatatgtgaataattgctaaccaagttttcgccttgcagcttgcctcgtggctctggaatcgtcactcggagaccccttatcttgcaactgattaacaaaacccccaccacgaacggggagaccaagttggagacaacggacagcgagtccaacgtgaacgagtacggtgaatttctacacctccccggggagaagttcttcgatttcaacaagattcgagatgaaatcgtccgcgaaacggagaccaaggtcggaaagaatgccggaatctcgccctccccaatcaacctgcgcatctactcccccaacgtcttgaccttgaccctcgtcgatctgcctggtttgactaaggtgcccgtcggagaccaaccgaaggatattgagaagcaaatccgtgatatggtcctcaagtatattagcaagcccaacgcaatcatcctagcagtcacctcggccaaccaagatcttgccaactcggatggtctgaagttggcacgtgaggtggacccggagggtcaacgcaccatcggtgtgttgagtaaggtcgatctgatggatgatggtacggatgtagtagatattctcgctggacgaattatccccttgcgcctgggttatgtgccagtggtcaaccgtggccagcgtgacattgagaacaagaaactcattgcttatgccttggagaacgagaagaacttcttcgagaaccacaaggcgtaccggaataaggcttcctactgcggtacgccgtatctggcacgaaaactgaacttggtaggggttgaccccaatcgtctatgaaacctttggactaacggacttcctatttttagattcttatgatgcacatcaagcaaactctgcccgatatcaaggcccgcatttccgcctcccttcagaaatacaccgcagagctagggcaactaggtgactctatgctcggcaacagcgccaacatcatcctgaacatcatcactgagttcagcaacgagtaccgtacagtcttggagggaaataaccaggagttgtccagcatcgagctgtccggtggtgctcgtatttcttttgtgttccatgaactctacgcgaacggtgtcaaggctgtcgatcccttcgactttgtgaaggacattgatatccgaactatcctttacaactcgtccggttcttcacccgcactatttgttggcaccaccgcctttgagttgattgtgaagcagcagatcaggcgactggaagagcccagcttgaaatgtatctctctcgtttacgacgagttggtgcgcatcctgagccagctcttgaccaaacagctgttccgccgctaccccatgctgaaggagaagttccatgctgtcgtcatccaattcttcaagaagtgccttgagcctaccaacaagctggtcaaggacttgatcaacatggaatccacctacgtgaacaccggccaccctgatttcctgaacggacaccgcgccatgactctcgtcaacgagcgtcaggcagccgccaagcctacacaggtcgaccccaagactggcaagcctctcctcccagcccgtgcccagagcccctcgctcgacaccagcggtgaggccaataacaacagtgggttcttcggcagcttctgggcttccaagaacaagaagaagatggccctgatggaggctcctccggcaactcttaaggcttcagctagcttgtctgagcgtgaagccaccgaagttgaggttatcagtaagtggactagctcatgcagaacgcgtgtgatatttgactaacactcacgcagaactcctgatcacttcctacttcaacattgtcaagcgcacaatgatcgacatggtccccaaggcggtcatgtacaccctggtccagtatgtatcatccccaatccctttcgtcgagtatactaacaaatgattttcctaagattctccaaggatgagatgcaacgcgaactactagagcaaatgtaccgcaccaacgagctcgacgaactcctcaaggagagcgattacacgacccgccgacgaaaggaatgccaacagatggtcgagagcctgggtcgcgccagcgaaatcgtcagccaagtccagtgacgaaagagtggacttggtcactagacgatttatccctagaggaaaaaatcatcccattgaccgctacgttggtggagttgggctcctcgcatctctttgtgatttttgcaacacgctccgaatatcttgactatactccgtacttgctttgctgttcctaccatcccttggttagcgacttgttccgttggtccttgtttagatgttgatccgggtggttcgggttcggatttcggattttcgtcttctttggtttcgataagagggagttctttgcttcaccttactacatgttttcttttctttttttcccaatttgagagctctataccgttttcctttctcattgcttggtctgttgtctgcgtttgcggacttcctgccacggacgcccggatgattgtatcaattaatgattctgtctctgctttatgacttagcttagaattcaaatgttgacttttcaatgttttcatcatttacgttatagttcatatcagtacatgcaggggcggtaacttttgagacgtgagaaagctacagtcaacaagaatagtgccaatacgatttggatatccaataatatccgcgcgagcaaatgctagacaacaccggttttttatgtgtgggagatgagaaggtgattatgaagatgatgatgtccttcattctttatttccgcagtttgatgtcgcagaagtgctttaaatacataaaattggaaattctttccagtagatacaaaacaagttgagcaagcctccctagcgaacggcgaccgtgacatggacgttgatgatgtccatggaagcaatgtatgctagaccagtttgtctttcgagatgacgagcttccattcaatgattccatgaccgcctgccaatggtttcttcggggtgtggatgattcttggacatatttccttggtgcctttttcttttgtgggttatggctgtcctgcaagtccacggtggtgaggagtgttgtgggcagagtttgatgtgggggggggggggtttttcttgttttgatctgtgccttgggcttagaattgtcagcattattgtcttgaacggggctgttgtgaaccaaggcttaccatactcatgattctttttcttcgtgacacccgttgcgtgagcatgaaggagggttgaaaatgacagagacaatgccttcgatgtatttgtgaagcctcgaagttgtcagagagtttgtggttggtcatgagtagtttcagaagagcttgatagttggcgctccttgtttcagtgtgccaacccagtctagtgggaagtgatccagtcaagttcaaaagtcgatgtcaattgatgccgtgcgatgaacagttgttgaggctttgtgtctcggaggcgggctctttagtaccgtttcgtggagaatcaatgtggtcttcggtattgggatttgatgtgacccaaaggtggaggtattgagaggctggtggttgtcgagtgctgggaattgactggatgatatgcactgacatctctatactgcaaccttgcgagaccactcttgtcggctttcactacttgatgtcaactcacagtgggcagcatcgatataccagaatcaactcgcagtggacagactgatataccagaatcaactctaagtcccaggtaaattaggaacagtgcaccccctgagcatacaacccaacacgccgcctattggtgctgggaagtatggtgtcagaggatgatgttcctaattcactcgtgagcgtcgagaataatggttcttcagtgctgccacggtcccaagtaccagaaacatggatcccttgatcatacaacccaacacgccgcctattgttgctgagaaatatggtgtcaagaggatgtattccgggctcacttggcggccgtcgaggataatggttcttcatgctgccacagtcccaagtaccagaaacatggatcgattgatcatacaacccagcacaccgcctgttggtgctgagaagtatggtgtcaagaggatatatctctggctcacttggtgactgttgaggaaggtagtgagggaccggcaggaggtggtctgcaacattgcagcaagttgatgggtttccgcattggactgggtggtgggatgaccgtatgagatgggattgagttaagcaggaagttattcaaattatcgaggatctcgtgggttggtggtgactggtgactagaagtgttagcactggcaaaagcgaatcacaagttgggagacaaacagtcatgtcattgcatccctcttcattcaggtggaatcatgagctctgctggctgggctatagtagaattggaagtgtcgaaagactccagtggaatcatcagggaactgtgattttggaagtcagccttgcatctcaagagacgatatttctgatctcaccaaatccctttctcttgcgaagatcaaaagcaaccaattttccatcccttttccttgttccttcattttgtcccgtctgatgcaaatccatttcctccttcttttcccttcttttgtggtttgtttctttccctcttttcttttctttttttttgtagctgctgttgtctgggaatgatgatgatgatgttggttgtttctttttcttttctttctttttcgagctgagcatcaggcaattgccatggggggttccattcggatgcaaacgaggtttctttgcgcagaggtatgtggtcaatgatgaatatatggatgttgcggtggcagtcaggaggcatttgccggtggagaagtggaggcagccctgttcggtggttggcatgttgttgtggctgttcagaagtgcagaaatgtgtggattttatgtaagatgtgatggtcatgcacagtaaatcaatgaagtggcgggcacatgcaacaagttgcgaggaaggcagattgaaaatgagagacgctgttcctgtggcagaaggcaccaatgtgaacttgcgtcagccaatggatcggctggttagatcttccactcatcattgcagagcagaagaaacagagaggtgagaagggttcgaatgctcaatttcttacccggatatttgcaaactgcaatccaggttgctgttcgtgatgggtggtaggctaaaagcagcaacatgtaaatgatatagcgtttgaggcaaagcctgtttcaagctgcaagggtttgttttgattccacatctatcacggttagtaccgagcaaggatggaaacatagtgatatagtgatggaacaatgttgatgaaaggccaagggatgacatggtcaagtcaagatgggttaggggagaggaagaatatactcacaatgcacagcagagatgcaagatcaaaagccacagtgatgaagcccatagggtgttaggtctatgagacaagtaagtgcatgtcagtgattgaaggatggtgacaggtggtaggcagacttaccttagtggacatgatgtgccacgtgagtgtgggtgttgacatgacagatgtgacagtcgcaactggcagtcagatatggtgacggactccatttccaatgaatcttgatgcaagatatgatggaagatgtgatgtggagtggacaagatattttgagacccaagctgatgatggaatgtacttggggtgataaaaccctagatggaagaagggggattgatggaatgaaagatgaggaggatggggagttgaagaagagagaaatagtaaaggaggggggggggggggggggtttnnnnnnnnnnnnnnnnnnnnnnnnnnnnnnnnnnnnnnnnnnnnnnnnnnnnnnnnnnnnnnnnnnnnnnnnnnnnnnnnnnnnnnnnnnnnnnnnnnnnnnnnnnnnnnnnnnnnnnnnnnnnnnnnnnnnnnnnnnnnnnnnnnnnnnnnnnnnnnnnnnnnnnnnnnnnnnnnnnnnnnnnnnnnnnnnnnnnnnnnnnnnnnnagggggggggggggggggggtgttatataggtaggaaatgtgactcgcttaggaaggtactttccctatttgggaagggacaatgggagacaatagaacccgtgggggccttcccaattgcctatggtcatatcaggtgatacccaccagccgctagctgcttcttcatgtggtattcacgacctggtcaggtacatgaaaccgtcttctagtgggcatccttgtagaaggtatgaagaagtgtagctttcaaactagcattcgtgataagccaatgccgatatatagcccagaattgatgctgtaatcataatcttacagtgcaaagtagatttattccgggataagagtagtcgaccgcttatgcggccttgtcatgacattatggtagtcttcttagatcttagtctctttggatggttttttctatatatatcatccccccattcttaaatttttctaattaaacggcggcaaaaagaagggaaagctcaatccacgtagacaactttctagacctttgatctatgaagcctcggggattggagataagctttttgacgccagactgtgttcggaatagcggatccgcccgtcatggcgggtcaccacctgggcaacatccatggaatcatctaatatccttgatgttgcgtcttttttggttggctttctggcttattactggaagtcgcatgggtacaatggtcgggaaaagtaagagaagtaagaaagaatcagaattgaccaagctctactttcgcccggtatgccgataactatagtgccaatcctctttcttcaggtcttgtcgcaccttgtaattcctctctgcagcctcaataggccccatatccaaatcggcaacgacgaatccctcctcagtccccatcttagcaatcgaacccactagagggagcgtaatctgcgataggcccaagaaatcctccgacggcccggcggcgttgacgaagacaataccacaggtattctcaaagcagcgggatgtaatggtcgactcgaggaagagggcttcagaatccgggttatacgcgcgagcttcgggagaggcgtcgtggggggtccctgatagaagtttgagttagatcagtgaggtacaggctaggaaaaattcaacatacagtatgtaggcacaatcacaatttccgccccgtcgacgatcagttcccggaatgcttcggggaatgccagatcccagcagatcatcattcctacgcggccgatcggggtgtcgattgccacatggggctctgaccctgaggaagtgaggtagggtcgttccgggtgccagatattcttcttgcggtaggagccgagcacagtgccatcgtttgagatgaagtatgctgtgttgtagagcagggttgattgatcgggccccgtgtgcttttcgatgattgtacccggtacaatacagatttgcaatttcttggccaggcgttgatagttcgctaggtactcggcggacttgccggcctggactgtccaaaggggatctgtggggaccatgccgctgagatggtatctgattgactcgaatcagccagtgttcatttgttttggggctatccagtgtcgtcagacaggaagtctaataacacatctcttactctggaaggacagctagctcggcgccctgagcagcagcctcactgatgtagttgcatgctgtcgcatgattatactcagggtcaagctcctgcgatactgttagcaaatccgatcgcaattgcatgtcttcaatggttcgaagctcgggtacagcccaagtcgatgcaccgaccttgatatgccattggattacagcaatgcgatgcgtagaggccattttatgtcaattctacaggtacaggaagcgattataatggagagaagaaaaaaaaaacaaactatccatggtcatccactggctaccccaacgagaaattggggtcaatgacctcaacaatcccaccccgccgcgatcaaatcgtctatccaaaaatcaacatatccagtataagaatagtcggtcgcgtatgaagcctccgtccttgacctagctcaatgtattgatctatttgacttaagatgagatcggggacttcgtttgccacgaccttgggctccgaacttggcctggtggtcccattaaccactctccctcagccacatccccatccaatatcggaactaaaacctccccgcttcgttcatcgacagcagcacaaagattctaccccgttcactatttctgcatccagagggataaccggcgcttcgccatctagttcccccttgatcatgccacagcctgacgcagcgccatcttcccagtggcaagaaagcattccgaattactaggccatcctctctgaccgccgaaacactcgcacccacccacccacaacctaagactcgtttaatagaaaaatacgattcctgcggcgtagggagcctatctactcccgataggtgcgccggccgtagcgaaagaagagtcgcgatcttcacgcagcagctgggcgcttccaacgctcaccatatttacgctagacgaagtgccctagatctaccttgttttctaagttttccgggttcactggggcagcagagacggaagaagaaacagctgcctctcccacacgtgaaattcccacatacaatatagctagaaggatgatcattggaaatggtaggaagacatgccggacacactttacggcaatattctctgtacgaccaagggaaataatccttggccagcgagacaatatcggcgagtaaaggaggtacagatacggagtatagtggagtacccgagagacatccctgaaaagtgaacaccttgagaattgatattttcaggacaaaataagtctgtcatacccctgaagttgaagccgagatgagtcaaacagctgcagtcccaaggtaaacaaacttcaaagtccaattcaaaatctgactagatcttgcatactgcttatccgcacttctgatctgtcaatacttcgtagtagggcttagatcttcacggaattttagaatagcctggcaagaatgctagccctaggagattagaagtccgaatctttgtgaaatagatgttatgctgctatcttggcaggaaatcggctatcttccactacgggtttaggaatgacctagatatactcggcctcgggggacatgctttagtacctgcaaaagaccaccccttcaaataaagaatgtcgggccgcgggtgccgcttaatttctctcgtttcaaggatatatatgggcccctcgcatttctttgtattcttgtatctcctatcagcaggtttcggtaagaatgcaagtaagaaggcgtaagacacgtcgatgaatgattggagataacaccttccactgccaagtatagggcggctgtcctacgggagatggagaatgcaggtaccaattagaagggggaaatggactattgatatctcggtagccctaacagcatagggggaatcctgctaggaacggcccacggcatagccggaatgaaaagcgggccgatctagaacatccctttcatattagacgatggtggacaatcgaattgatgacgatggccgagtttcaggtttttccaaggttgggatatatgcgatgccaagaaaaaagcatagccatgatcacatgtcaatgcgccgagacttgcatctattcagggatatgtctatatcgcatatcgtacatgcagcaaggcagtgaatcccgatttttgaatccgtccgagtgaaagcttatcgtgaaatggaggtgggaagaaccttggaatccactggagctctttgtttattttgatatatattcgattgtgatatcatctgtatactattcccaaaacaatccaaggtgtctacatcgccaaatctagaaatacactttgcttcgccacaaaccgacaaagacggacaaaagggatcgacagaccacgttttctgtggcagatgacagtaccataccgtactgtaagattcccgcatgcgtgatttttccatcgcagctattaccatttcctttttctcaattcgaccagttctcttattcttccccattcatctccttcctaccttccctccgctatgcccgcgattacctctacgcaaaatcgtggctcaatgccacgcggctaagagcggcctccccccgtctcttgcacgaaacctctccgctcggtagcgctcgacgggaccacatgtatgtatcgcgaaaagccaaactcgagatgtaaaagctaatgatgcaataggttggaaaaattcccctcctttcgagagcaccccgtctcgacatctccccctttgcggccagtgccagtgctccctgctcggcaacggtctggccgcagtccgttcaatatgttctcggattctctccaccgagcgatagcctacaagaaaaagatcccgattctaaacgaactgcacctcaatttcatctttctccactatgtctacatcatatcctgggttatcatcggctcggtcatcgtttaccccggtggcaacctcgactacatcgatgcccttttccaatccgctggcgctgccacccagagcgggttgaacacggtcaatctgaatgacctccggctttatcaacagatcgtcttatacctaatgacatgtctgtgcacaccgatcttcatccatggcgccgtggtatttgttcggttatactggttcgagaagcgcttccaacatgtggtcagtgacgctcgggcgatgcgacggagccgatcccgcatgggaaccgtgaccgatgatgggcgtacccaggagaataatatcaatcgtgcggagctaggagtcagcggtcgacccatcgtggtggtacgggaccatttaggggatgcccgagacactcgagtaacggacccggctagcaagaaaatcaattcgggcatgaacacaccggaactccggggaagcagtgttgaatccaactccgaagaaacggatacaagcagcgaacctcgttttggcctcgggagcttgaaggtgccaacccatttgaaccccgaacaccacatcgccttcttggaaaagcagcggaaggataaaggagcgttgcgcatcccgagtccccgggagtatgaccgtggtggtgcgcctgaggctttggaagaagacgtggaccatgaggagcaccctcagaatttgagtgaccatgacagccaacatagccccggttcaagctccgagcggctcgatcgactgggtccacttgaagaacagcacatcaccatcaacgaaccagatatttcacgatcccgtggtcgcggtagtacgttccctcgtctggatactcgccctactttgcgggagactaaagatgggaatgaggttaccacccttggcggtgctaacgcgaggaacacattcaggcaggtgttccggtctctgacgcaagagcgtgaccattccacccaaccatatctcagttggaatgcgacagtggctcgtaactccaatttcgtcgatttaacggaggagcagcgtgatgagttgggcggtatcgaataccgtgcactcaagacattggccgtccttcttatcacctactacgtcggctttcatctcatcggcatggttagcatgatcggttggatcatgacagacacccattggggagatatcgtccgggctgatggagttgggcggccgtggtggggaatctttaccgctgcgtcggccttcaacgatttaggtttcaccttgacacctgactcgatgaactctttccaaagagccattttccctctgctcatgctagggtttctaatcatcatcggcaataccgccttcccatgcatgcttcgtttgatgatctgggtgctttccaaattcacccgccagggctctgcgctatgggaagagttgaagttccttctggatcatccccgtcgatgcttcactctattgttcccccgtaacgccacttggtggctgtttggcattctcgtggccttgaacggcattgatctgatcttctttgtcatcctggatgtgagtttgttgtctccttctcttgtgcgacttccactgaccatgctttttagctcaacgattctgccgtcactatgctgccacccggaattcgagtcgtggacggctttttccaggctgctgcgacacgaacagccggttttggaatcatcagccttacagaccttcaccccgccatccaggtttcctatttgatcatgatgtatatctcagtctttcccatcgctatctctatgcgtcgaaccaatgtctacgaagagaagagtttgggtatttacgatgccgcagaggatgatgatgacgaagagacaaatgcccccacatacatcggagctcatttgcgacgccaattgagtttcgacttgtggtatgtctttttgggcctgtttatcatttctattgcggaaggtggaaaattgcagaagaacgaccacgctttccagctgttcactgttttgtttgaagttgtctcggcatacggtactgtgggtttgtcgtttggatacaccggcgtcaatacctccttctcggcgcagttcaatgtagtctccaagttggtgatcattgctatgcaactccgcggtcgccaccgtggcctaccatatgcgctcgaccgcgccgtccttctcccctctgacgctctcaatcgacgtgaggccgcagacggagagcgccgcatgcgccgtcgcgcatccaacttcagtggagttgggtctttcgcccaatcgcaatcgcaatcccagtcgaggaacgatcttggtcattcttcgggtatggacagccacgactggcaaacccagcctactcccaatgcagactctgtgatacatcgtccctcggctgtccatcgttcctcaactgtccaatccgatcggtagaaacgggcgaaaccttcatattcttttgttaacacctattagaggcttggcgttctacatacatatgccctggcggttcaatcttaatttcaatgtacacataattatagaaatattacttcctttgctgatgggataaaacttagccttgtgaccaatataacactgggtaattgtgatgtaatatagaatgtattccgtccgagcagcacattggtttatatgtccttgaaccttgcatggccgtactagtcgatgtagggcgacgaccaagcagactaggccatttatagtgaggtgatccatggatgcacaggcgggaaagatcggcgcttttccattttaggaacagagtaaatatccatgacgacaaactcgatagcttttcgaggatcaccagggtgtaatctaggcagtagagcatagagcccaactcatctccaaatccaactataccaaatcctatatgcagactatatcaatcaacatggacaaccaacagctaccatatctaaacggcgacagcggggccaacccgagcgaccccactctcgagctcaaatccccaatcatcaacagccaaccagacggagccggagacaccccagccaactctcgcccctggtataacccactcggctggtccctgctcgtgaaactcctcgtcagcacagcagccatagtaatcatcctcctggttgcaatcctagtcccctaccaaatagtctcaaaccgctacccaaactacatacccttgaactacaccctcgccgacacctactccggcccaaacttcttcgagcaattcacctatttcacagacgaggacccgacaaagggcttcgtcgtctacgtcaacaaaacaaccgccggacacctgaacctcacctatgcatccgagacatcggccatcctgcgcgtcgacgcatcaaccccgaacacccgttctggtcggaactccgtccgcatcgagtcgaggaatacatacgactctggcttgtttatcttcgatatcattcatacgcccttcggctgtgcgacctggcctgcgttgtggttgaccgatggctatagctggccgacgaatggcgagatcgatgttcttgaaactaccaatatcggcagtcatgggaatgaggtttcgatccacactacgaaagggtgcaatatggatgtcaagcgcaaacataccggccaggcaatctttaagaattgcgacaattccacgaatgggaattccggctgcgcggtcatcggtgatgagtatacttacggagaggcgatgaacaaccgtggtggaggagtttatgcccttgaactccgcgacgccgggatccgcgcttggttctttccgcgtgtagctgtccctgctgatgtcgctgctgggaatccggatccgagtagctggggcgttgcgctggcggatttcccgagtacgaattgcgatattgcgacgcatttcaagaacttgagtatcattgttaatatcgatctctgtggtgaacttgctgctcagaagcagttttatgagactatgtatcattgtcccgcgacttgttcaagctttgttgcgaataatcctggcgggtttgttgatgcttattgggagtttaatagtttcaaggtttatcgtgcttattgagattagaggatggttgaaggcagggttctttttggcctaattttgctatttgctgggtgacatgattgggttgatcagaagcaaaaggaatgttttgtggcagcatgtctttttggttgtttgataggcttttgctgaaggagtttggtgtcgggatgtaccgtacgagcagataaatgatgacttttctttcgtgctatttgtattttcagtctgaatagcaaagcgctattgcataggagatcgacacaagatcagagatagtcgagacctactgcactcacgatggggcacgcgtagctgaatatcagacacgacatatccgtttgaatgccggatgaaaatagcagtcaatatagccagaaaattgagggatagcatttcatttctgattaaacgaaatcctagatatttgaagctcatgctctcgggtcgtcgctctcatcactgtaacactcctcgccattctcctcatactcattattgtcaatatcgccccaccatccttctccagatacttcgaccgtctcatcgatgcagtgcagtaatttcccagagaggtgtatagcccctccttgccaccagaagttagcgtgaagcggaccaatcagtgccttgaactcttggcagtatggcttgtcctcggcgagatcgaagtactccacgtctgcattgttgacgacgagatttagatcggtgctgatagtgccggaaaaggagtgtcgctctccatcccgggtctggatcaaagcatgtatccttcctttgttgcaggtgagacttcctggagatctatgctcctcgcgtggttggctagcggattctcgattcatcttgggaattgtttggtaatgagcaaggttgggatagaatttggtgttggtcagtccagtggtcttgtgcgttggacgacgaagcgggtggagggatagttctcggcgcgatgtgacaacaagtcagatggtgtgatgactcttctcagaggcttcgctggaaaatgaaagagatgtcagaataatcttggatcgaagtgagaaatgatgagaaatgacttcggaattagtgtcaaataaatgcgaaagatagatattcagtttcacttcattgctaaatcaacataaaatgggtatctctaacaaagatgaatcgtctgtcaaccacaaccggctatcaataattcatctctagatcaaaagacacggaatgcatcaatgctaacgaaattgtactcaacagccagtggcccaagagaccctaggtataccaaaacagaaacccgcaaaaaactcaatcatgatcatcgtaacagtacataagaaaggaaaagaaaacaagatgaatgaaaccactacagctgccgtagcagactgccatctgcaaagggattctctggagacatatccagcaatggccgtgtggcattgcgatcacccgttgcgacaccatgtccggtgcgtggattccaatgactagtagtgctggctgaatgtgccagcaaactgtttgcagtgaactgggcttccgggcttccttcagaagaaatcggggccgcgtatttgtttgagtggtgacggacgctgcgggcagtgttccgccgctgaggtgtggtgtccgcggccggccgtctccaagaagtcgcgggtgggatagcgattcctcccgggggctgatccggaccagtggcagcgtcgatcagttgcatgcctggttggactttcacgccgcgacccttgcccttgcggctatgctgcggtggctcgacaaagactggggttaggtcaaccagaggcttttgcttaagagatggggttcgagtgaaattggatgaatcgggagcacgagtcattgtgttggtccggctgttggggtttgagtcgtggccgggggtatgtgtggatcctccgctcataaagccaacgcctgaaaaggcttcttgcttggctcttttatcgcgatcctcccgttcccgcatagcattttgtcgctgggtgtaggttcggcctaggagtccggatggtgcaaaagcagattctccttcctcgggcgaagagatacctgaaatcaatgcctgtctatcgccgaaaggcccgtccatttcggcgtcgagcatcatagtctgggaatatgaaggtggagggggcacatatccacgaagagtcttcttccgagcaaagtactctttggagcttgtcggcctccgttgatcagagctttcgcgcctcgaagattcagccgaagtctctcgttctaggagtgggacttcgttgtacacatttctgggctcatgcgtcgatttcttcgtcccggcgcgctgcacaagtttctcggtctctgctttctgggctgctcctttcttgttgacaagataccaacttctccacttctgtactgcccggtaccatgtatctgcgatagacttgtcgctggtcgagaaaaagtgcagaaagttttcggtcgacagaaacatggatgatttttgctggctcttgattgcgaaacacagcttcttgggtggcttgatatccttgttcagcgcccgagcgctaggaaagtagatgtcatagtcggatatatggcagatattggtttcctcggtgtcctccttttttgagattgtcacttgtccatcagcacgcagagtaacataacgcttatcccacttgcgacgacgctgggaatggtaaatatggacagtcactggggatggtggcccactggaggcattcccagcatcgagctgagcgagggcttccacgctggaggggggaataacgatgaactggttctctgcatcgtgtgaccaggaattcataacttcccggacatgctcgtagcggcggaggggacgctctaggccaacttgcgagaaagactccatgagaatgaatctgtccgcatcaatgtcccgagataagtgcttagtggcatctagcaataaatcccggacttgagttgacggggtgacagtgagatccgcgacggcatctccatatctgacaacggcatgtcgctctccggcgttgacagcgctgacaggagcatcaactcctggaacgattccggttccgcccaccccgatgtatcttgggggggactcggttctcttgaggtggaccttggatcgggaaagtttgaccttctggaagaaagacttgcgatgctcatcgttcgatgagtgggaactgtgcggggggcgcgccgggacaggttccgatcggggttgttgcgccgagatctcccctccagtcaattgttccatcgcaccttgtcggtgcacctcacgtgcttcctcttcctcctcatcttgctccgccaaagggcgactagttgcggcccgttcattttgtcgtagctcacctcgctgctccagctgagtccgagcgtagcccgggattgcaggaggaggtgcgacatttccacttgactgtggccgatttcgatgatatcgagaacggctcctcgcgatcgaggggttctgctctccgatgctatgcacaggcgccggtggtgcggccatttcgacgtcgccagttgtcgcacctggcattccacgataccgagagaacatttgaggtagggattgcgccgtggctgtcacactattctcactcatgttttggaaatttctcacttgaaattcgcccccgggggccgaggcgcaagagtttcgtaatgtgtttcacgttctatcgccaggataaggttagcgtcgccttaaaccaaatggcaatttcccgtaatttccttcgggtcgaagatcgaacggccagtgctgcgagtgcgattcgggttcctggaagtgtacagaaggtggaaaacacaattgagacaaatgtgggaaaagtccgcaggattcgactcaacacaaccccagtgctcgcgatcaaaccggcctgttctcaatcgaccattcgcgtttcgttaggggggaaaagcgacccgcaccgatcatcaattgggccggcctaggctggtgcatggggttcgctggctcgtaggaatcgatcgttggatcgatcattggatagatcgtatattgattggactcaccgaagtcacttggcatgcagtagttgatcatcgaggagttggagaaaggagaaacatgattgtccagaagttcaggtgggcaggtgggcagatgtcaggtccctgcccggttggtttggccaaacatttccggatccgacgcgccgcgtgcggtttcacgcgctgtcggagtacaatgtacaatatacgttggcctgatggagtatatatctatgatcgacaggtacggaggactattggcattgtattggcactattagattgttcaatggacaatgtgagattattattggatgatatctacggatccacaggacgatcagatctaagtgtctcactccagacgtgcttgctattctcctttctggttttcaacgggacttggcttttctatatttgatcattcttacaggcgaattgaattcggtcgatcttatttcctataagcacccatttcccggcgcctatgggttgttagcatagacatacaaacaaggtataggtacaccccggggagaacttaccaccacgcaatgaagtccactgttcgcacatcaatcccaagctcagtcaatgccttggtagacagatgtgtatcataaggccgtacgacactcgaattgggatcattgccctgcttattggggatcattccgggaatggccacacccatcaccttggccaacttctgacaaatctcatacttggtcatacggtcctcggacgtaaattgcaggatgtgagggaagtccttccgcttctccttctcgcgcaggtacttgatgacaatgtcccgacacacgcgcgccacgtcctcggtgttggttgggtaccgtatgccccagtcgtccattttcacgccggcgttttcatccgtagcctttgttactgcgtcgatgagggtgttgatcgcgctctccgagttattcttggcggtgccgtacagcaccggcacgcgcagcaccacgcccatgcctgaggcactggtctcttctaatacggccacctcgccatcacgcttcaattgcccgtacagattcggtggcttggtctcggcattggcctcgtatggtgcctcgccttcggtgccggggaagacgtagtcggtcgagatgtagatgaggaaggcgccgcgagcttggcattccttagccagtgctcgagtggcatcgacattgaccttgcgggcttgatctgggtgctggtcacataggtccggggacctgtttgcggcgcctgtgagctgtcagtctatgatggggtatcaagtcagccaattaactagcttacaatggatgacaatctgaggcctaggcatagttcaaaggtgattaatgtctataatcaagatctagatggaatacacatacttgacttcatcgaacagcattcggatatcctcctccttctccaggtcggccttcaagatagtaggcggggcagggcgggtgaatccctggccaacaaccaacacgcccgagtgctggaaggtgttgaaaacagaacggccgagcaagccactggctccagtaacaagaacgttagatgtcatttttgttgtagatatgggttaagggaggaagatggggaggatttcctttctgaaaccgcgggaccaactgtgacgtaactaacttctcccagtggatataacagtgaggacataattaagccacctatgtagacaggcaacacatgtggattcactcaattcgatcaattgaatcaattccagtcggttctgtgctttatacacgttaagatatgccatatgatactaggggtgtgtatatgatttcctatttgggctgccgctttaatcagactcaggctctcagagtagacatcagcacgaactcacagagcagtcacgtgcatgatgacttatactatgtaagacgggtgctcattggatgctcgctgattactcagtggcactctgtgtccaatcagtgaacaactctgatcacttagctttaagggaacagccccacaaggtcgtttatactgtgatgtttagttcgtaggtcaaattatttcaagaattttgcgtattttccttctggcaacaaaagagcccactttgtgcaatttatcgcaatgcccgaaaagatgcctcccttttgcaggttggacttcaagtcatttcaagactggaacggtgaccgtccatcacagatcctgatattccacaacaatgactcttcatggtggatcaaagttaccgtggattggtccttgccagaacaagtactaagtctgggttatttggaacgccggtccgtctttcgagaattccttaaagcgattgattttgtctaattgcagcttttggacgatactgtgacaaacattactctaaacttgaccgagcagagtcaaaactcgatcattatacgggatgggtatcaaaacccagcgaactcttcattactgttgcccattgaatgtactgcaagattgcggaagatccaaagagagtcatatacccggcgggaacgatctttaccaacatttgaggctcgctgtttgcatactgttgaggttatagctccaacagtctccatagttgtgttcgagcaacgcctgtttgcttataaaacgattggccgccctatctatgagcctgaaggcacgaaccatgtgttaaacgaaattgatgtccttgcacaacttcgcggacttccgagcatcgcgcagctagttagtctagttgtatcagagaacccatataagacctgcccgtcaaccgctatgccaacagtgatcacaggatttcttcttgaatactattccggagggtcacttgagcaaatttttgaggatgagtttcaatttgatactttgccagtacaatgggccttacaaattgggacagccttcaatacattgcacaaaagagggcgaactcatcttgacatcaagccgtcggatatcgttttggatgccaataaaaatgccgtccttatcgatgtcagcggaaccggtggttacgtgtgggaatggcgttcaacagagatgcaggttctcattcagcaaaacagtgaaacaagtcctgccaacacaccgtttgaggcatgggttgccacggatcgttaggcttatggaagattactttcggctctcgccgaaaaaagtggcacacctgggattggtagaagactgcagtctatcgctgatggtctgaccaaggcggcccccaaatctcgcatcttactatccgacgctctcgcgcaactagatgagaaggcgtagtattcgtccacaagaagcctgaaccctgcgagggtagaaccgtatacatcaactgccatttttttttccatttagccacctaatttcctctatcaactcgaaaaagacacctgatgaccgaagtctgtttctgtttctgttctgttctgttgtgaacctgccatacaggtacaaccagcaccaatctgacatgcccaaggcttattattgaaatatcgccggaggactgctgaggtatcagtcgcgcgggtgttgggggttccaatacggagctggaggctgggaagcaggggagaagggggtctttttgttgtcatcttgaacataaatctactacgaatcaggatactccgtatagaagtcaggatggaatgatacaaacttaggacctgcacgcgactctcttcataaccctaatggggccgagaatatacagccatgatacacctgtccaattttactctgagatcaaaaagcggcaagaggtgagcactaaaacagaaaggggacggtctcgagtgctaggcattatccggtgaatatgcaactatatttactgaatttgtataatattatctatgcaaactaccaattaaacaatatagactgctctaaatattctacaagcattgaatatagaaggccgaaaatccccgagacctgcgagctctcggaggcaaatcggaccatcggagtatctccacttgacattctcaaaattgttcctttttgaaatcctcagccatgtccggtgtcaggaacatcacagccgctttgcggcgggcccgagggccccgtcccagtctttctnnnnnnnnnnnnnnnnnnnnnnnnnnnnnnnnnnnnnnnnnnnnnnnnnnnnnnnnnnnnnnnnnnnnnnnnnnnnnnnnnnnnnnnnnnnnnnnnnnnnnnnnnnnnnnnnnnnnnnnnnnnnnngggtgacagaacccccccccccgcttggcggcgggcccgagtgcctcgtcccagtcttgctattcgcactgtccaatccatcacacctttgactgtgcgcaccttcagcgccagctccactcgctccgattcccgccagatcaagttcaccagcgacgcctaccccaacctcaagcgcgaccctaaattcgctgagatctctgcggaagatgttacatacttcaaggaacttctcggctcccaatcggccgtgatcgatggcgtgaccaccgacgcgaaggacgatatcgaacccttcaacagcgactggatgcgcaagtaccgtggccacacccggcttgttctgaagcccaagaatgcagaggaggtcagcaaggtgctgaaatactgcaacgaccacaaattggctgtcgtgccgcagggtggaaacaccggtcttgtcggtggttcggtgccggtcttcgatgagatcgtcgtcaacacttcccgcatgaatcagatccactctttcgatgctgccaccggtgtgctggtcgccgatgccggtgttatccttgaggctgctgaccagtacctcgccgagcggggatacctcttccctctggacctgggtgccaagggatcctgccagattggtggaaatgtctccaccaatgccggtggcctgcgtctcctccgctacggcagtctgcatggtagcgttctcggcctccaggcggtcctgccggacgggactatcgtggatgcgctgtcgactctacgcaaaaacaacactggctacgatcttaagcagctgtttatcggcgccgagggtaccattggcctcgtgactgctgtctctattcagtgccccccgcgtcccaaggcggttaatgtggcttacttcggtcttgagagcttcgaccaggtccagaaggccttcctcgctgccaagggccagctctcggagattctctctgcgttcgagctgatggacggtggcagccagaaaatggttattgaagctacgggtaacaagcaccctcttgagggtgagtatcctttctactgtctggtggagactagcggttccaacgccgagcacgacatggccaagctggagtcgttcttggagagcgtgatgagcgacggtattgtcgccgacggtgtactagcccaggacgagacccaattccaggccctgtggcgctggcgtgagggtatcaccgaatctctgagtcacttgggcggcacctacaaatacgatgtgtcgatcccattgtcggatctgtacctccttgtggaggattgcaaagcacgtctcacggaaaagggcctggtcggtgatgatgagtctttccctgttcgtgctgttgttggttatggtcacatgggtgactccaacctgcacttgaacgttgccgtgcgacagtacagcaaagaagtggagaaggcgatcgagccgtgggtgtacgagtggattcagaagcgccatggaagtattagtgctgagcatggccttggcgttgccaagcgggagttcattggttacagccagaacgagacgatggtgaagctgatgaagcagctgaagaacctctatgacccggtaagtggagcggcattgatctgtgtgggtaattgctaacatttatttttagaatggtatcatgaacccatacaagtatatttagagctaagtgcaatgttgtataggattggagcataacaaaagtctcggggccgagaagtaataattacattatgcacgagcatgtacgagcatgtccaacgcacaaactcaagtcaaataagtaaatgataatccttccaaggccatattggcaatgttagaggtaaatcccatcagctgagtggaccccttgcatttttaccccagttgctgcctgaggccagccgttgccatgtgatacggagcttgtttagggatggacgctccaccccttgcccgccattcccgatggcttctttactctcgtcttgacctcttggaagtcccaagctattcattcattacttggatgagccctgtcgacattccctgtctgaccggagtagctagctgggctgaattattgcgcgatggacgacatggcaagccactatcaggtgatggaggagctgggaagtgagttgcctaaagctctttttatttgttgcatttccgtcgctaaccgtaatctccgtttgcaggtggtagttttggggttgtttacaaggccattgacaagaccgacggcgagatcgttgccattaaacacgtacgcgctttcatgatcttcgatattcgagtttcaatttgtcacatctcgttcaattgttgaccccttttcagatcgatctcgagtctagcgaagacgatattcaggagatccaacaggagatttccgttctggctacctgcgctagcccctacgttacacaatacaaagccagtttccttaaggggcacaagctatggattgttatggaatacctcgggggtggctcttgcttggatttggtacgttccttgctgctattttatcaggggtttattgctaactcgccccagttaaaacctggatgttttaacgaagcccatgtggccatcgtctgcagagaactccttctgggcttggattacctgcacaacgaaggaaaaattcaccgtgatgtcaaggctgccaatgttctcctttcccagaccggaaaggtgaagctggcagactttggcgtcgccgcacagctagtcaatatcaagtcgcagcgcaatacattcgtcggaactccattctggatggcaccggaggtcatccagcaggctggatacgacttcaaggcggatatctggtccttaggtatcacggcaatcgagatgatcaacggagaacccccgcatgccagcacacaccccatgaaagtgctgttcctgattccgaagaatcccgcccctcgcctcgaaggaaacgactacagcaacacattcaaggacttcattgcacaatgtctgacaaaggacccggatttgcggccgagcgcgaaggagctcctgagacacaagttcatccggaatgcgggcaaggttgagtcacttcaggaactgattcatcgcaagcaggactgggatgctggccgtggtgaatcgagagacgtgaaatactatgccgagtctctcaacaacatgaccaggccggatgatctcgatgaggacgattgggtctttgatacaatcaaggctcctccaatgtggaagcctaagggcacggattggatgacattcgacgaggaggaggaggcaatgcctgatccagcccagatgctcgaggacttgcatataagcgcaccgccgccgcctaggcaccaggctaactctaccgttcgccgagttcctaccgaccggtctccgtctgtcaagcgggctaacaccaagcgtcgctcaagtggtgtcaaacaacctcttggtctagacttaacctacggcaacagcccgtctacggtcagacagttccgccgggtgtcagacaaagtccccactgatctgaacccagccaagcagggctatgatgagaatcaaagcccgaaaacggtgtctaccgatacttcaagcaaggaggctcagattggacgacgtgcctatagcaaggcagtgggaatgtcctgccaagaagtcctgtcaacaacaggagatggtgacaaacgtgaggcaatctccagactcgcagaggcctggagcgacctggaaatggtcgaccccgaaggcctctaccacatcgtcaggatcatgaacgagaagatccaagcagacccccgcctctccactcttctcccacctacacagcccgattccccctcgcggccacgtctcctgttggcccaaaacaacccacacctcaaaagccaccgtcgtcgccaatcctacgtccccgaaccccaatcccagtcgcccccatccatgcccgctcaagctgcacccggtatggaacacactaaacaactctccgacgtcctctaccagcgatggtcagaaggtctccgcaaccgctggggcggcatctaatctcaccctgaatcatcctcacgcaacatcaacctcagcacatcctcttactctttcttccattcgctgtatagtcccgatttggcgttctgacgcatgtacaactctttgccattggctgcatccttggtgtccgttcgttcattctgtttaccgtcgcttactctggtgggactggtcccggagtttctaatgatctggtgtaatatttttgcgctttcttgtgtactttctttgccccgatagaatgctgcttgtgcttctgtctttgtttattgggccttggtcttttgtgaatttttttcctaggtattctcctggattactagaacatacatgtctgaaatgtgacaaatgtcttgattttttcatcgcttcgcattccttcgatgtatctgaagctgtaactaagatcaagcaaacgccattcatactttatccagattcatccggtgtcaactcatccataagtttacggtatagcgtatgcagggcatgcgaatggggctctcctggtatctatggcggtcagccggctgacccgggagttgtggagagatactccgtacatgtggctgtcaactggaactgcgcagaagattgaagacgaatccagcggaatctacgatagcgcggatactggctacttgtatattgaagatgatgatccggataatgaactttggctgaagctctctgaccacatggacacttccatctttcttgtatatcaatgctgtcagtacattccctttggttcgtagcatagaatccgccattactcacgctagcaccagggatagaaacgaatgccaactgggcgatccaggaaggggaataaataacacagcacctacaaaacaactcagtcattcgtaaatccccaacttgacctaattccaccaccacattccgaacttgacttttttattaaaaataaacccaagataagatttaagatacttggatttatacttagctcatagaatctccaacttgatatcgcaacagtctataaaaacagtcatttaatcgatgattcagcaacttcatgaacgccaaggcctgtattttatgcatgagacccatatactgaagaataccagacaatttaaccgaaggaacaaatcggcttcactttaaaatctatggagtcattttccatttgagtcaaggtcccgctggtgaccccaaaccagcgggatcactccaacgccaatgggtcgcgataactgacgaccccaacggcaaactctccggccatagctgcttatgctgttatcgcaaagttactattgccaagcagtgactctaaacggatctgaaatggagtcaactataaaaagtacggcgaatcccaggttccccggaagagcagccagtcccttaccctacaccttgtcatataccttatcatacacacctctcccaagatgcgtccttctttaagcacgtggactcttttcctatcctacctaggatgcagtgtagctgctccggtactacctattctccctcatcatcttgttgcgcgcgacacccccttcaacagcagccttccgaacatcaccattttcgctactggaggcactattgccggctctgcttcctcaaacaccgcgaccacgggatacaccgccggtgcactgggcgttgatatccttatccaagccgtgcctgagctctggaacctctcaaatgtcaaaggtgtccaggtcgctaatgttgattcggggtccatcacccccgagattctcctgaacttgtcatcgctgatccaagaggctctggacgacccatattgccagggagccgtcgtcactcatggaacagatactttggaggaatcggccatcttcctggacctgacgatcaagacggagaagcctgtcgtcgtggtgggcgctatgcggcccgcaacagccatcagcgccgatggacccatgaacttgctggaagccgtcactctagcaggcagccccgatgcacggggccgtgggaccatggttgtgctgaacgaccgtatcgggagcgccttctacatgaccaaaacgcattcaaattccctagacaccttcaaggcagttgaacaaggctacctgggcttcttcctggataccaagccgctgttctactatcctccagtcttgcccaatggccgtgtgtacttcaacgtctcgggggccacggcattgccggaagtggacatcctattcgggcaccaagtactcaacccgaagctggctcgctctgcagtagagagtggagcaaagggtttggtcttggctggtatgggggctgggggctggacaaacgcgggaacaagtgagattgagaacttggtcaagaaatacggtacgcaagtcgtggtttccagcaggacgatggggggctttgtccagacagacggcactggaaatatgtacagtggacaggacttgaacccccagaaggctcgtattatgttgcaacttgctctttacgcaggatatggctctaagcagctcgccacattgttcgggtttgcatcttgagagcatgttcagatctcagcaatagcgggaggctacatagcaattcctagtcattagcgcttaggtatatagtatataaggataaattcatgtataacctgacctctcaccgaaattagagccatatattcgtaattactggctcatccttctcacaatggcactgccaagaattgagctgcaatacgggttggttcgtgccctgctcagtaggatttagccgacagcagagaaccccacggcaaaagatcgttccaatatttggtgtacgcccagatctggtaatgattgaccaatgtggattatctccaactgagcttatcgagaacagcacctccaggtctgggcaagactgggcattgtcagcaattgtcttatctgatgatacccagtggggccgtggaataattcgcgttatctactccatatgttgtacatcttttacgtcacaatttcacctaatcatgatccaattcaatgagccaatgatacaccgggtatgatggagtatcgttgaaaaatcgcagttataccagagggcataggagcattagatgtaaggacataccgacgtttttagatgtttgcctgagatatttgcctggtctgtcctttagatgtatatgaaggcgatcataagtataaactgtagctactccgtcaagtccgtctctatgtctagccgggcaattgaaagaggccgaaataagaaggtgggtccttcccgagaccagtctccacttcaaaccttgtaatatcacggacgggttgctcttctgggccacgactgtaccgcagaggaacagggaattgattccgaaggacagatcggtacgggttcttcgttatggtggaaaaggaggccttaccatctgtcttgaactcggatctgaatggtttgtttgtctagtttatgggaaataggagctagacgaatattatagagctcacggataattgcaagctcctagaagatgtacagagcaggatgttgctatgcatgtcaattttatcataattttaaattaaaggtccatgtaaactaagctaagtaggatggtagtaaaattctgcagtcctgttgcttgaagctgatggactgattatcatttgtgtggttcaccgccaaccattagatcaggatggcatctcgattcatgcattaatcattcaaactgttttctcatccttgtcgttatgtttggccacatcgttacattttgcgtttcgctttggatgggagcgcggtcgttgtttcgattcatgtgccgcgctttgagctttggaggctattgctttatccctttcatccagacgagcacgaagttcagtaaacatccgctctaccccatctaactgctccgtttcttgagccttccactcggcggattgaattcgatctggtatcgagcagaagttcgtttccgcccacccacccaaaaatagtagccaaccgcccgacaatttcctaagaggaaataaccagtccggcttgactttatattcaatacctttggcgtataacaatcggacatagtcgactaattcgcgcttcatctgaagcagtgaatcgaggtcaagcttcgcctcatagatacggagccgaagtggcgtccagataatcttcggcgaggcctgcacaatgataccagacttgagatcggcacgtatgatacgtgggtggccgattggggagcgaatctgaaaaataatggatagaacagagtattcacgatataacccagtaaagcagtcgggatggaactagaagaagatcatcaggggttaataaggatcatccatcgatagaacgagccgaaagatgactaacctcgcaaacagtccacttttcttttttgtgcctagacctctagatctcttgacagttcgtccctcggcagaggtctcgaggacctcccaatctttcgtgttacggataagttgagatatggattgatggggtagacgatctgatcgctttcgttttggccgtgatggaatttgctgtggttgggccatgctcagcggctgctcttctgtgggtatcgcttgcatcacggtattgacaatagggcgatagatggatggtggagagcgaaggtggtttgtgtgggattgggatcgggactggattattgcgagacgcggatcgcgtcacgactttgtgtttcgtaggcctcaacgcgcctgatattcgaatgccaatttagtaggcaattcggtgccactttagccgattaacaaccgggcacctgaactgagactcgagctgagtagaaatatggatatatttctaagaaattatgtttaaaagcgattctccatccaatcactccaatccagggctagattgaataacaaaaaaacaagtgcatcatccgtgaatcgaacacgggcctcgtcgatggcaacgacgaattctaccactagaccaatgatgctgaggcaccaggcggatctgaaagctgattggctggttatagtataatgaatagaaatggaatcaagaccctaaaacccagagtatacatatctatcatgacggtcatcgacacattgacctattggattaggaatgatgaattcagccaatattcacggtcattacagaagcaaaaacctcagaatcaattcatggatggattgattatctctggctacctaatttccgaggtattaacctccagggctacttcgtggcttttgaaaagaagaaagaatatatgatagaagggcatatacaatggtataggattcaaattcgatgatcttagcccggcaaaagcgatttctgaatgttgactatggcattctattccttgtctgatcctttcaacttgtaatccaacaggcctttgattgagttgagtttgactgagtgaagctataagctatgtgaatgtacttatacagagctaaacatggcatacaaatagaacgactagacatgggtgttatcgtcgaacacatcgatatcctctttctccgcaggcttcgtcttccgggacatccactcatgacgcaagagccccagagctgttggccggtcttcaggatcccattgtagcgcttttcgcatccactgcacgaagccttccacatcctcgccatcaacattgcgagctatcaggctctccaagcttcggtctggtattggagcttggcccgtccaagtcccttcttcatcccagaacatggagcctagtcgtgtcttgtcgcggaactctggtgcaggagggccaagtagagcaactagctctgcgatgtggacccggtcgtcaaaggctccatctgagtttcgtccgtcaatgagcccctgggaactgatgtagttccatgcctgaataaactatgtaagcgtatttccttttcctcaaaataaagtactcacaacgacagcagtaccccaaatttctgccctgtgatccgatttcgatttcaggacctgttcaggaggcctgcaatgcttctcctcgatacctgacatatcatcgcctgggaaatccagacgcaggggaacaccatcgcccgggagtatcattggggtgagaagctcgtcattgctgggtccagcaacttgtctgttgttggaaacgttaaatgttgcgtttggcattatgcctactctgaggatcagtcagtcatcccagaaacgatggcgagtgaagatacgggcagtaagataacagtctgtgtgcaggaagtccagcatgaccagtaattgttttatagtagacttcgtcgatttgagatccagcttgtctcccgcgtgcatctgtcctgggtctagcgagggtgcctcgtggacaacacaaatatgagggccgcgaggacccttgatggaaaagcggtcgctaacttcgtgaagagggcactcgctttgctggtatgttttcggtggattgagccgcccataaggcttgagcatatggtccaccacatagatctttaaaacaaccattcttggctccctgttgttaagtgagacttagagcagtatcgttcgggctaaatgagacactcacgtcagatcaacagcataccaaaccgctgccgtgggcccatagccgattttgtgtagaattcggtatctgtcgttcaaggtctcttcatcctccacgggatatgtgtatgtctcgttgggctcatatcccgttgcaagctcttcctcaattttgacagacgaatccagtagcccaagatcaaacactggaaagactcttgggttggatgtccactgtgatgagcatcggcgcgaccaggctgtttttcgatcaaagggagagatcagttggtacgtggaaatgggaaatggggaagaaatcccatatctttgaataagccttgtgttagaccaaacacgcataccactcactctccagttcatgacgaagatgcggtggttaacgaatgcgcttggttacggagtaggtacggttgaacgacggaggacgtgtcacccctgcatatttccgaggtctatttatatctcgaccggtgttttctttgatcatataaagagggccatcaccgcaagcatagaaaaaaaaaacaattcttagtatgtcgctacggagaataagcctaaacagcattgtctatcaggccccacaaaatttgaagtagcgacgtgccccataggttgaagtcaggctcgatctggcacatgaagctagcaggtgtacactagtctagacataactcaaacctacacgttatcggctacggagatttaaacccctcatgtattccgtgggactcgtcaaatggcaatgagagccacgactccaggaacgtccacgagaaagcccggtttgatatttgttgctgacctacatggacttccacaacacggtaatgttgatgtccctgtggtaggtgaagcagcatgtgctacaggaccctctgcctgtgctgtctcatgtgggctacggagagatggtggtcagagggatggggagaggaagaagagaagagaattggggggggagaggtacccttttataccccaatcatatgggttcgtgggctttctcaacaaactatgcaaacgagaatattactcgcttgtctcgcttgcctcgcttgcccagtatagaaggaacgtttccttctcatctgggcaagtacgatcaccggtccaccgtcccttcctagttcgtcaccgttgggattctcgcctggcttctctttctttccttctctgtgtttagtcgaacaaggtgccttcctggaatggacaccttcccactttcctgatctgtgagtcacttgcaccttccattgaagtacaacaaagcacattgttctttcccaattaagttatagacacggtcaactttgtataggggactcgtctcgtacgagaagacacaacaagcaaaccccgggtaaacaccgcaatgcttcggtcttccaggttccaaggtcagccttgactgttgatatactcctgaaccatgactacaacagcactccgtagtagatctaggcctcggcatacgccaagactccacgaaacggcttaataacacgctaaattaatgcctttaattcccccctgaaacaccgcctcgtgcgggacccgctgtaggctagactcaggagactcggagctattattttctcccttctcaactcccctgctcttcttgttgttcttgctattgttgttctttttttttggtttattctcttatgactttttgaaatatcttgatctctcctactggctggcccacaatggagagcattccaggagcggagagcctccttgacggtccatttccggataaccagaattcaaatccgccacaaccggactctgcttccgagcagttctcccattccagtctctcacgctcatcgtctgtcgcccagaaaagaatatcatcactaccttgtgccaagacggcccgccatgccaaacgcctcaccttgaacttccctatcaatccgaacgaacctgagacatccgatcttatcagctcacccggctctataaccccagttacacagtcttcgactcgtccctcccccgctcagcccccgggaattcctatggcatttgaggtcccggacgatggctatgacttcctgcgggccatcgcctcgcaggaacggaaggtcatggagctccgcgaggagctcactcgagccgaagcagacctagtgacaattaagaagcaatgggcaatgtcggaaaagtctaggaagcgggccgagatcaaccacgcggagccactcatgcccctgcgggcgcctgatttctcaacatccgaggcttcaagttcacatgcccggcaacagagcatgagctcagttacaagctccacggtgtcacaggaacggatgagccgggatctagatcgccgatctagcgtgcgtgctgctgtcgccgccgcaccaggaaccaagattgggagtaatggtcggcgcgtgtttcacggcacacatacacggacgttgtctcttttgtcgccagtctccggtcccagcatgtcttcccggggagaactaggtctctcagatgaacgcgtgggccgtactccgcgatctgcaacattaccatctgtcgagcgcaacaatccagctttgatgaatgcacaactagacgagagccaagtaccggaacatctactcgcacagtggcacaagacccttcctcccccttcacgcgaggccttggtacgcacaggcaagcaaatggcatccgatctccgcgagggtctgtggacattcttggaagatatccgacaagctacggtgggcgaagaaggaatcagtggcacgcaaacaagaagctcaccatccagctcactggcaccgccacatggtcgcaagcgggattcgttggcatcacggagtagagaacggttgatggcggacggcaagctatcacgatcatcatcgtcatcgtcttcgcgggggaggccagcggccgagacaaaaactggtaaagacaccaagccggcggaaatttccacatctttctggaatgaattcggcattgatacacccgctcagaagtctccgagcgctacgcgcaccccctccgacaacaaagccgccaaccgaaacgaggcgaccgacgaacagcgcgatcaccgctcgagtaattcgattgacgcacaggatgaagatctcgacaactgggaaagctgggacacgcccctatccgggcagaagacgcacacgccctcatcgagccgatccacagttgcatccaaacacgaccagtcacctattacacagggtagcagccctcgaaccagcgctaggtaccgttcgaccttttctgatttcatttatgacaacctcgtcatgcgctgacacgttcctagctttggcgatttgaacccgacttctgcacttaatcctagtgtctccgaaagcattccctggcctgcaattaccaagctggctccttccaagcttcaacgtactgcatccaacctgatggcagaatgggagcgctcgctgtcgccttctccggatcgagcttcttcttcttcttcgctcagccgtaaggacagcaagaaggactaacaaagttcctgctttcctttcattgtatatacttgctacctcttcttcggccctatctacggaatcacgtagggctacgaccttcgaattataccatatgagagcgttgcttcttctgttgtcgatatatttcctttcctttgctgcctttttgaagaactctacaggcatcgactgctttcaagattgttgaaatacgttggtttgattacaaatgccatttttgcttctctagcttcacgaatacaacgagtttttatatgtcttctttttgcgtctttcaacgtcaaataatgttttctgttcctctatctatacgtatgatgcgtaccgataacggcgagattttgcgggccggaacatcacgtgccgaactgcgctttagacttttctagttccccgtaaaataaatttgcggttcagttactcgcctccgcaagatctccgcgttctgtatattacttgctcacgcggtttcttctctcgccgaagttcagtggattgatcattcaggccggcttggatccaatctaacaagtgcgatattcagtccaaacctacccgcgtcagccttcaatatggcgtttccaggcaccaaaggcacggcgatcccgatgacctccctgggaggtaactcgggcaccgagggaatgaatgatcaagaacaggctatgatcaagatggttcgtcctcgatcctgacctgtattccgtctaattctaacaaacttcggtatagatgcaacgtggtatggagtcctgcccgatcaaaacagtcatctcgggtaccatgggtttcggtcttggtggtgctttcggtctcttcatggccagtgtaagttggaaattgaatattcgagcactgtttcatatctaacatttacccgcgatagatgtcctacgactcgaccttcacaccccagggccgcgctatcgccgacctcccctggcgcgaacaagtccgccgcggttttaaggacatgggcgcccgctcctggtcctcggctaagaacttcggtatcgtcggtgcgctctactccggcactgagtgctgcatcgaaggcctccgcgcaaagaacgatcttaccaacagtgttgccgctggttgtgtcaccggtggtattctcggcgcaaaagctggtccccaggctgcggccttcggctgcgctggctttgcggcgttcagtgcggctattgatgcctacatgagaatgcccggtgatgagtaaacgctcgattcggatccgacgcgaaagcacggccttgtttcgtcgcttggcgcttttgttgccagtcggctttacctggttgcgattttccacctgtacattttacagcatctggcgttctggaatagaacggaagcattgcgggcgttttcggttgttcttgtctattttgttgggaggatggttctccggcctgtctcctttgcgttgcatgtcttgtttgagcctgctttgcatggccttggcatggtggttcacttatattagatccttgcgggtctgactctttactcttttgtacaatactaagcgtggacatacatacaccactggccttttgagactcacctctcacaattgataccaaattatttatgctcatattattcattaattatgaagagcctccatgaaattcctcggcttattcaaatatccgatttgggctaaatctacgccgtccctttcctggcagaccgcatactatgcccgtgccaaatgcaaagctaaggagatccattcaatcactataccacgtcccaatttactactttaaagttacaagacctgacaaaaatacagtttcttcaatttatacacactcctaaggcaacacaatatacttttccaggtgcttaggaatggaaccacgcaggttcttgctctcgagccaggtgctagaaaacaagcgatccgcataccggtaagcaccgtcacagagaatggtcacaacggtgttacccttgcccaacttctccgcgatctccttggcggccaccacgttcatcgctgaactggcaccaaggtacagaccctcctcatccagacagcggtaaaccatctcgatggtcttctcgtcgctgatgctcacggatccatccagcaagccaatatcgggctgcaggttatctgttacacggccttggccgataccctcagtgatactgctaccagaccggtcgatcagggtaccaccgctttgaatgtagctgtggagcacactgcccggaggatcggcgaggaagctcttgacgcgtccgtcactgatggtcttcaaatagcgcgtggtaccagccaaggtacctccggttccagtggcacaggtaaaggcgtcgatcttgccctcggtctgtgcccagatctcgggcccggtagtgtcgatgtgtgcttggcggttggcaatattgtcgaactggttggtccagactgcgttgtccaatgactcggcgtgccgacgcgcctggtggttgtagttttgggggttgtcgaaggctactgcggggactgggtatacctccgctcccagcaggcggagcaagtcaatcttgccttgcgactgggtgttgggcatgtagatcacgagcttgtagcccttggaccggcacacatgcgccagtccaatgccagtatttccggccgttccctcgaccacggtgccacctggttgcagaagtcccttctcctcggcatctttgaccacgaaaagcgctgctcggtccttcacgctacctccggggttttggaattcggcctttccaagaacattgcagccggtctgctcggaaagcttcttcaatcggataagcggggtgtttccaatcgctgtagtataagtcagctaaaagtatatgcaagtgtgcgctcggagctagacataccctcggtcaatccattgacaacgccctgggcggttgatacgcgggtgcagtaggcagtggatccctcaccagcagcacgagccgccgtggtggcaaaccgccggacactttgacgaaacatcctgaattaatgcaatgcaggaataaatggtcccatcgaccctcggggaatgacgagctcccgcacctccgatggtcggcattagtcagctcacgtgcgtctgctacccttatcgggctatcggcctcccgttttgggctgtttgtttaccgccaaggcctccactcctttgatcggtcccgcagtgcggtgcttttcgctttcgaataatcaacgtcaacaacaacaccataatgcctggcagagtcgccgcccgttcgacatctgcgacaacacgcagatcgtcagcacagccctctgcgtctgggcgtgctggctccgttacgccatcgtttgcgatccccgaagaaccaacagagccaacatcatcccccactttgcgtcgcgatgtgtgcttgatctttgcggatgctcagcgctcaactactggacatcgaaagcttgttgtgcgcctgcgcaagcttcaggagttttgctgtggtatctcacaaaagaaaaataagggaaaggacgaagagcccgaggaggcattgattgctggtgaggaaacggaggctgagaaagaattcaatgtggaagttggccgctgtatgcttcggattctcacgattaagaaaagtgagcctgttggagaccgaattgtacgctttttgggtactttcctcggccatgccgcggagaaagataatgagatctttgctgcgggtgaagacgaggagcacaatcccgacacaccgacttcccgcctcacatctagtcttattgcgctgatgaaacctgttatgggcgccaaggataagatggtgcgcttccgcgcaacccaaattaccgcccacattgtgaactctctagaatcgatcgacgacgagctataccatgctataagacagggccttctgagacgcctccgtgataaagaggcctctgtcagggtacaggcggtcctaggcttaggacgtttagcgggtgatgatggagagggcgacgacgacaactctgctctgcttgaaaagctgatcgaaattatgcaaaatgatacaagcgccgacgttcgcaaaaccctcctcacaaatctccctctcgctccagtgacgcttccttatcttcttgagcgcgcccgtgatctggatgcccctaccagacgcgcgttgtactcacgtcttctgcctaccttgggtgacttccgccatttgtccctctcaatgagagaaaagctcctccggtggggtctacgtgatcgtgatgaaagtgtgcgcaaggctacggccaaattgttttacgacagatgggtcgaggattgcgctggtacgaacaatgacccgaatcagggaccgactggccagcgctctgcacccgatatcaacgcgcttcttgaacttttggagagaattgacgttgttaactctggaatggaaagcggcattgcacatgaggcaatgcgcgggttctgggagggccgtgcggactatcgcgaagctgttatctttgacgagcctttctgggagaatctaaccggtgaatctgccttcttgctccggtccttcaatgacttctgtcgcgtggagaacgaaggcaagtacgagagcctagcagaagacaagatgccagaggtcaccgcgatggcctatttcctaggcaaatacatcactaatctcttggagcggaagaagatctccaaagagtctggtgaagcaaacgatgatgacgcagtcgagcacgaatttgttgtggaacaattgcttcatatcgccatcactctagattacagcgacgaggtcggtcgacgaaagatgttttcgctcctgcgagaaactttggccgtgccagaacttccggaagagagcacgaaacttgtcgttgaaacacttcgctgtgtctgcggacctgatgctgcggctgaggccgaattttgcagtgttgttttggaagctattgctgaagttcacgacaccatcaccactgaagatagctttgtttctgctaggtctgaaatcagtgatgacgctagcagacgatccgaaactccgggggttgaagagattgctccctttaataaggaagaagccaaggccaagatcgtccgcgagattgttgttaatatgaagtgtctatatattgcccagtgcatgttgcagaatgtccaaggccacctgcagcagaacatgaacctggttactatgctcaataaccttgtggtgcccgctgtccgcagccacgaagccccaatcagagagcgtggtctcttgtgtttgggcctttgttgtctgcttgacaaggttggtaacttcccttttgatggaaggcgaaattcgctaatattgacttccacagaatttggccgaagaaaacatgaccctcttcattcactgctatagcaagggtcatgaggcattgcaggtcacggctttacaaatcctctgtgatatgatcacgactcacccatctctcctcgctcccgttacacaggctgacggcgagaccgtcacgccgccccccatgcagaagcctttgctcaaggttttcgcccgagctctgcgtgccaactctcccagcagcgttcagtctggagcagccgccgctctctgcaaactgctactgaccaacactttcactccctctggaccgaatatcccacccgcaatccaggaacacaatcagaatgctgttgaatcccttttgctatccctcgtggtctcattctaccacccacgcactcgtgaaaacccagctctaagacagtcattggcttatttcttccctgtatactgtcattctcgtgtggaaaacacgcaacacatgcgccgggtggccgtaccagtgattcgtgccgtgatgaatgccgcggaggagcactactcacttgaggccgaggaagacagtgatggggaaatcgatccgagcgtcggggagcgtgaggtcaaggctctcatggctggtgtcgttggtatgctttccgagtggactgacgagcgccgggtcgttggccttggcggtgaacgagttctggctggcggtgctgcaagctccagtgtttgtggatgggttcaccttgccctagttaaggagattcttgagcgtgttctcggtgtgagcgctgccgcgaatcgctgctcacgcgaggaacggaagctcctattctccctcctcagcaagctttactttgccgctccaacggtgcccgcacgagctagctctcgcgttcccgagggcgatgatcaattccgaactagcgttcgcagtgcgacaggggtcgaaatcgatcctgaaaacattgccctcgcgaccgaggtcaaggagctattagaccaaaccattgaagatggtctcgccgccgaagcctccagccgaaatgctttagtcaaggccaagaacgccatcctcaaaatccttgccgttgcacaagatggtcgcgctgctagtgctcgtcctcgcgaaggcactgaagatcccgagaatgatggagctagtgtacgctctagtagtgttcgtcgctctgtggaccctactggtggctacagccgtcgtcatttctctgttgagccaagcatcatggaggaagacgaggagggtgatagccgtcttacttctgctacggccaatcggcccattgtttccattgaacctagtattatggaagaagatgaagatgaccatgatactagtcgagggacaataatcaaggaagagacgggtgatgagtgatgactgttctgagatttttggttggcgtttgaagttagggatttggggttaagtttctgtacatactttcagtttctgtttttcttcgaatacctttgcatacgattatatgagctatctgagttcctcatgctttgtgcatgttgatgtatatatccacgtgatgtgccacgtgattatgttttgacagcggctgagagacttgacatttggaatgtccatcttgtccaccttgtccttccaaggttgtctatatttgtctcggttctcgctatgtttcactgtatatctatctatacctaggtacggcgtacatctgtcctacctggtaatcgcttttgacctttgtgcattccttatattcgatacatatcctacctaatagttcaggaagtgtccaatcacccaccgtattagccattccctagctcgagacattaatagacatgcatctatatactagtcctacttgactcgtctaaatctgacaaggcgtactaagacagggatctgggcccggttgggttgcacggtcaaaaccagtccgaacacacaatttccaggggaatttgaaggatagcagattcgatgaaagtgagagagagaataaagaagattaatttctgaattcctcaagaaaaacatctatataattcgttttgtaattgtataatctccgtctccccccgtgagccccgaaacttttcattttctcctcaaaactccaccgagttggctcttttcttcttctcccccccccctttcccttctctcctcccccgggctttctcttctattcttaccaccctcttctccggccttgtctttgtcttctgcttttcccgcagagacatcttccccatcttccccccgggattcccttgccgctccgttggcaccggacaagtcagcgatggcggccgtttcagcaccaacccccaagctggatcgatacatcgtcatccacgttgcaaccacctgcgacgaacatggcgtatatgtgaccaaggactcggctgaggtcattgagttaggctggatcttgttggacaccaagacctgcgaggaagtccgttccccccagtgtcttctacccaacatacaacttactcccgagaccatggaagctgacatattttttccccaattgtttagttgcaccgcgaaagtgttctcgtcaaacccgtcaatactccaatcaccccgctttgcagtaagatcgccttgaaaacaaccttggattgcattgggttttgctaggaatccaatttgtggctgacaattctctgaagcgagcttgaccactttgacatgggaacacgttcgctctgcaggcactttccgggacgccatctctcgattcgacgccttcgcccaagaacacctcattagcaaacacctcgagtttgcttttgtgactttggactcgtgggatctgcgggtgcagctgccccgcgaggcccgcgacaaggccgtcgtgcttcccgcatacctgcagcactcccgtactttcgacttgcgaacagaatatcagcgctggcagacgcaccaccccgagtcgcttcctttcggtcccagctcgctctccaacatctgcgctgccctcgaggtcgagcccgttcagtcgtccgccccgattaagcacaaccttcctttccatttgcaagctttggcccccgcttcgccccgccgtgccatggaggaatctgttactctcgcccgtgtgcttcgtggtttgattcgcaagtcgcagccgccccaggaacaccctgagatcctcactcgtcctatggatgctcatgccgacgttcgggcctttttggcggaacggagcaaggtcctgcaccttagtggtctgccccacgataccactcagtctgagttggagagctggttcactcagttcggcggtcgtcccatcgcattctggactctgcggacgccagaccagcacaagcccactggaactggctttgccgtcttctcttcacacgaggaggtgagtttgcatcttggtattcatttggctgttctacgctacagaacttcctgtgttttatccttagtcttgcctactaactgtttactaggctgccgaaagcctgtgcatgaacggccgtgcgctcaatgaaaaggcgattgaggtctctccctcttccagtcgggttctagaccgggccgccgagattctcactcctttcccgccctccaagaaccgtccccgtcctggtgactggacttgcccgtcttgcggcttctctaacttccagcgccgcacagcatgcttccgctgctcgttccccgccatggcggctgcacccgacccaatgaactacggaaactacggctacggtccgccatcaatgatgcctcctcacatgggccacggcggtcacggtatgggtggtggtcactcgcgtggtatgggtggcaacggcggcgttgtccccttccgcgcaggcgactggaagtgtggttctgagggctgtggctatcacaactttgcgaagaacatcaactgtctacgctgcggtgcccctcgctcgggcgctgccgtcgtggcagactcggcattcccgtccccgatggatccaccgtcgcaatttaatatggggcccaactcgatgactagcacccctgcaccagctccgttcgcctcgaccgccggtggattcggtggattcggtcagcagtttggtggcccgcctaacaactacgctctgccctcgggtggcctgggtaacaacacccccggtgcgtaccctcccatgggtcagatgaactcgggctacggctcttccggcacctcgcactccgccgcctcgttcgccaacccggccactcaggctgctttcactggtgcggaccacggtgttccatccaccagtgcttcgaacggtgccttctacggtaccgatggtgctagcgaccctttcgccttcttgtccagtggcctcggtggtctgacagtgtctgacgacccccactctcgtcgcaacggctccggtgccaacaagtcgcccgcttaaatatgggtctagttgtacctatttcatgccccactcacgaactgggcgctcacgcttatgttgtccatattgcaaccctgcattgtggcgggtttctgcgttggttgatattggttgatacgcatttgtataagggattctgcggttttggtgcatcgggttggaaggagcaggcgggttagcgttgtcgaagattttcggatttctttctctctcgccttcgccgcccagtgctttttttgcgtgatgccttgtttatcgttgggtttggtctgttttttgttttttttgtttttgttttcctttttcttcttcttttcccccatatttgtgattttcatcttgcgctatatggttgttttttttatcgagggcccttataggggtgtgtggtgcattgtatttttcgaatgttccggcccatctctggtttattgtctgcaggcatggacacatttgcgttgggtttgccctgcttttggcattgcattttagatattttgtggctccctttctgcactctttggtcatgggaagcgtcggagaattcacggtcttgatctgggtggggatatactgggactccgtttggggtgttggggatttattttgaagcttgggcatcgaatggaggatctcttcggggtcgaagcactgtgaatgcaaaaaaatcattgtgtctatattttcatgtgtattttcatgtgtattctgtttatttgggtctttcgttaggattatataaaattctagcagatcgggtgatatatattgaccagtacagagtacggagtacattataacgtcttagaagtgtactattcgacagattttagtgattcaaggtgaatctgagaccttttctttcatgacaacactgtttaatataaagatgcattctcattacaagattgttggtcaactgctaggtacatggagttactatggtgcgtccatactgaacgaaagtaccgcgagtattagcgctggaggcagccgtaggctttcgcgtccaccgcccggaacccgtcattgctccaacccaattgacctcagctacttgacactccgcgttgcccttattctacctcattgcttcctttgaacttgttgtttacagacctttaatcacctctaatccagtcctccttgattcacaatgtccggatacgaccgagctctttcaggtaagctagctccccacgtccagctccctttgctcctgttcaggacgagagctgtatcatgctaactcatcgcagtattcaggtatgaagccttcaagctacacttcagctccagagtttgttttctaaccctctcccagtcctgatggacacgtcttccaggttgaatatgccatggaggctgtgaagcgaggtaagatcgccgtgatttgcttccctagcagcttcctctgccccattttctgctgtcgctcccattctttccatcaatagacataatttgctgatggtagatgattctaggaacttgcgctgtgggtgtcaaaggcaaggacattgtcgttctcggttgcgaaaagcgttccgccctcaagctccaagatacccgcattactccctccaaaatcgccctggtggataaccacgcctgtctcgcctttgctggactgaacgccgatgcccgaatccttatcgacaaggcccgcttagaagctcagtcccaccgtctgactgtcgaggaccccgccagcatcgagtatattacgaaatatattgctggtgttcagcagagatacacacagagtggtggtgtgcgtccatttggtatcagtacgctggtggttggatttgacaagaacgacaccatcccgcggctgtaccagactgagccgtctggaatctactcagcctggtaggtggtttgccagcctacgtctcgtaatggatgaacgctaatctcttttctcattacaggaaagccaacgccatcggtcgttccagcaagaccgtccgcgaattcctcgagcgcaaccaccaggatgacatggaccgtgagcagacaatccagctgaccatcaagtctctgcttgaggttgtgcagacgggtgccaagaacatcgaggtcgccatcatggcgcccggtaagactattgagatgctgccagatgaccagatcgagtcgtacgtgaagaacatcgagactgagaagcaggaggaagcagccaagaagaagacccggacagggaccaccacggcggctattctcacccggccgggtggcgccgagtcgaccgattaagtgcgaaaggattcagagcctgagaggtgactggatcgttgatttgtttcaatttacagtagcgttgggtcctttccttgacgagaatccaaaatcatgaagtctaaaacacatctccacatgtgcaggtttatttcgtattgtatattgtacaccaaggcagaaaagggtattggtgccaaggaagttttcatctgtcttgaactatcaagaaacagtaccatcaaatcgtcaacatcatgaaattgcgccgtccccgctaattgtcttcccacctccccacccccaatatacacagtttagcccatacggtcggacacatctttgatagtgaagagagagcgctccttgtcgcgcgcaacacgttcgtccttgagcatacttgatctggtcagcatcctgccaattagaagattgtgctcgacataccggttgtccatacgagcatcctcaccctcaacatgtagtcgcgcctcgggctcgcgtgcctcaatgacaaagtgattatcacagtaagggcagtattcgtcactaaaagcaaattagcctgctgccacttggactttgaaccctttcttgcatacgtctcgtcgaactcagcagcgtttttgcggaaacacttcttgcacttcttgcatgcaaagatctaccccatcaatgtcagcctgatagacctgcgctagccggagaataggggcgtaccatctcgtcgctcttctcgagcgggtgtgactcgctctctcggtggcattcggcgcagtcgaaccattttcggcctagatatcctcagtgaatcctgtgtcatgaaatacgaggtcgatttaagcgtacagcagtgcgagcggatggatacttgagcgttcagaatgtgtttactgcggagcggggtgtattagcaatcggattttggaccagggaaaggaatcacgagcatgagcatgctccaggatatcacgagaagcagacttaccacatggctatgaaatgcgaaagaaaaatgacagcaaagtgctagatgtcgatgctcaagtccaaagagacgcggacagaaagtgatcgccaactcccgtgattccctccactttcctccccgccacccatctcatcaagttttgcctttcacccccttttaaacccctggatatccctcggaattcctggaaatattgacggtcaagcttcatcttctgttcctgggccttttgcgccgcttacgtcgtctccttgctccataccccgagccccacgacatccctgtagcctcagttccgtgcccacgaacatttactctactgcctccgcgccactatttgacacccaacatctacaagtctatgatccattctttcagctggtctcggcgacggatccgtgataatggccatggccggcacagggaaacagccggacaacaatgatgacgctgctcctcccactgtatgcatacgtaactgttttgttgcacacaataaactaacatgaaatacagccacagagaccggtgtcctccttgctgtctcatttcgagaatctttctcaccgcagagctccgtctgctgtagctgccagcccgcgcacttccacaaaccttttactggcaactccggagtctggcgatgacccccgatcctccacccgtgcttcgctcgatttgccccgagaccattccccatggacccctgctgaagataaacccaccccgcttcagcagttgaatggcgagagactccgggatcgtgggttctccggcagacgatatggccggcccatgtctatgaacttccaccgttcatcgccacagctaccgccgaccttgacagtacattcgcctaaatcgccgccacgcgtacaagatcgcgatgaagtctggacaccgcatggtgacagccgaaagactcggagtccaggccatcgcccgcgagaatcgatgtccgtctcgccggcaccacctcgcccgatctccccgataccgaagttcggtccgtccgttaatgcaggggatacaatgcctagggtgtcgcctgggtctctccgcgccaacctcactgggagcccggcagaccggaaattaaaaagtgcctcgttaccgcccccagccaaccgcgcatcaaagcccaaaatcccggcgaaaccagccatgctttcttacccagagaccagctcgttggctcctcgaccaggacgagcatcacccgatcgaagtgtttcaccttttagcacccctcctggtagcccagagaagcatgtggctgagccgaaatcgtctgggaagagcagtgctaggccagcaccaacattagctcgaccaaggacggagccaccgattcgacgctctttcgatgagcgattacctgctgcgtctccgagcgccagacatgacgctagagagttgggattctcaaggattcctcctggtccagagccctcacgtaactccaagcccttgatggtgcaagttccatctgccccagtagacgctccaactgccactgctacccctctttccgcgcaaagagcccgagccagtgatattccctccgatcgcccagggcttcctcctcgaccttctggggctccccgccgaagtggagtctctcccgtgcgagagtcttctagacatcaaagcactcattcgcagctggcaccggctgttggttctgtgccttctttcccacgtgctagccaatcctccgagccaaaaccaatccagcggcaaccatctataccccgtgagactaaactgtcctcttctcttcccgagcggcgcgtggtgcgtacagacacagaggaagaagagcaaatcgaagagccagctatcttacggaccgactaccccgatgcctcaaaagctaatcgtcgacctccccgctttaaatctggaccgagagatatcctgacaaagtatgatacccgtttgctggctgtgtgcggcaagtacgtgtgcacgactgggtatctgactagggtgtgggatcttacaactggtgatctagtgatgagtctcagccatggcgagactgtgaaaagtttatctcttgcttttaagccaggaaaagatcttgaaagcgagggtgagcgtatctggctcggtaccagtgctggagatattcacgaagtcgatatcccgagccaatccatcgtggccacccgcgcatacccctcccgccgagaagtcatccaaatcttgcgacacaagaaagaaatgtggacgcttgatgacgaaggccgactgcttgtttgggcaccagacgagaccggcacgcctaacttgcaatacagctaccacaccccttccgagcgtgtagcccgaggtcacacgttctccatggtagttgatgacaagctgtggttggcagcagggaaagacgtccatatataccgccctaatgcacgggatgatgtcccattcaaggtcttcaaacgacctctcggtcttcaacactcgggcgatgtgacttccggttcctataccacgcgagatggaggtcgggtatatctgggacacgcagacggcaaggttactgtgtattcctcaaccgattttgtttgtttggcagtggccaacgtcagtgtgtataaaatcaactgccttggatttgtcggagactatctttgggctgcgtataaaactggcatgatttacgtttatgatgtgtccaccaacccttggaccgtgaagaaagactggcgtgcccacgaaagtcccgtatccagcttcgtgttagacatgagcagcgtatggaccatgaaccgcctgcaggtgacctctctcggcactgataattgcattcgcatctgggacggaatgcttgaggacgattggttgggtaagtaaaatattgctctcatccgttgatggcttccactaacacatagtagatgcgcggatggatgccagagacgtggaatactgcaacttccgagaaatcaaggctgttgtcttaacttggaatgcgggagcttctacccctggcagtgtgcgaacgtcggatttcattcgagatgttgttacccccgaagacccgcctgatatcgtggtatttggattccaggagttggttgatcttgaaaataagaagatcacagctagtaagtgtaacaatgtttgtttgacaggaaggcccgctgacaccgcctcagagagcttgctgcttggtagtaaaaagaaagagaacggcgagaaggagcatatgagtcgtcagtatcgagtatggatcgatcatcttactcgtacccttcacgaatgcatgcctctcgaggaatcctacgttctcttgcatactgcaaacatggtgggactgtttacttgcattttcattaaacacaaggaacgccataacatcagaaacatccatgcctccgagattaagcgcggaatgggcggtttacatggaaacaaggtttgtgatattccggtctttgctatggcctttatctaattgcattagggtgcccttgtctttcgcttcatcctggatgacacctcgatgtgctttgtgaactgccatttggcggccggtcaaacccagaccgctaaccgaaacaacgatattgctgcgatcctagaagccgagtctttgcctgcggaaaatagcatgaccctgcgggcagaccagttcgctagcggtggtgatggcaccatgatcatggatcatgaagtgtgtatcctgaacggagatctgaactaccgaatcgactcaattcctcgaaatgtgatcattgacgcagttcgccagaacaacttaccaaaacttctggatcgagatcagctacttgcttctcggcggaagaaccccggtttccgcctgcgcgccttcaccgagtcacgtattaccttcgccccgacctacaagtacgacgtgggtacagacgagtatgactctagtgacaaaaaacgctctcctgcctggtgcgaccgcatcctttaccgtggcctgggccacgtcaagcagcttgattatcggcgccacgaggtccgcgcctccgaccaccggccggtcagtgcaacgtttaaaatccgcgccaagaccgttctaagtaaagaacggaacgcgtcgtgggaaatctgcattgatgaattccaagatgagaaacgccgcttggcttctgaagttagcatcgagtatctcatcactgtccttggcaccgatccccgccaggcccgtgaattgatcctgggaaagcattagccgctcgcatgattgtctctccttatctttctttttcgaagtgaagagcacttctttttaataagcatttgggtggaagcatggtgtatattgtacgactaatgattttacgatagatatgtatcatgacggttgttagagctaaaaaggtttctttatatgagtgtagtattgtaccaggacatactccgtactctttctagcattgatctgcattcaagaagccactctagagacctgatgtgacatacaataatcggagtattttccgaatgcgcatttcctgttattttgattcttttcctgtcgatctttctgcctttccccgtcccctgtcctccgccccctgtactcttcccagttaggaacattgcaagatactaaatgaaatctcaggagaatgtctcaagatgcgttttaccacaggactactccgtatgcagctcgtataacaatgccctttgcaaatcttatagtttagggcttagctatctgaactcttcaatctcatcttgacgtcttcgtagtcctctctccatacccctctatttaccaattgatgcgtgtaagcgatactactgtgatgatcgacactgttatccccggcgaaattaattaaagtgacatgactttgacccttccccgcacaagaccgggttctataaagatccccggatttacaagatctagttaattagcacagcggaacgaaatacaatatacagtcatgctagcgccattcactctcgctgttgcattgcatttgctaccagtagcaaatgccctggttagggaaagtggtgttgtatgttttcttctgtcatgaactaatcacagagatactgactcaaataagggtagattgcctgctctaggatggaattcctggaatgcattcggatgtgatatcaattccaccaaggttctaaccgctgccaatgaggttgttaatcttggactgaaggatctgggttatgagtatatcaacagtatgaaccgagctttgcataaaatgggttgaatcactgaccctttctagtcgatgactgctggagtattcagaacacccgcgataatagcacaaatcgcatcattccagatccatccaagttccccgatggtatctccggtgttgcagagcaagtccatgatttgggactgaaaatcgggatttacagcagttagtatcccctccgtctgtatactgatcagaaatcaagactgatatacgccaggtgctggtgatgagacttgtgctcattatcccgctagtctgggatacgagacagtcgatgcgcagtcttttgctgactggggtattgattgtaagtttttttgtattcccgtgaatctgctttcacctaaatgctaaaactcgtagacctcaaatatgacaactgcggtgtccccagtaattggacggattcataccattactgtgttcctgagggctctggtagccaccctaatggcacctgtcctgatcttagcgatcccgccccagaaggatatgactggaaatcatcgaacacatatgcccggtatactgcaatgcgtaatgctttactcagccttgaccgaacaatcttatattctctttgtgactggggccaggctgacgtcaatacctggggtaatgaaaccggaaattcatggcgcatgtctgacgatatcaacggtaagttgtttgactgatacgcagtggtagatttagaagctgactctgtgttcagcaaattgggcccgtattgcagaaattgccaatgagaatagcttcctgatgaaatatgtcgatttctggggtcatcctgacccggacatgttggaggttggtaatggagctcttactctcgaggaaaatagggcacactttgccctttgggccatcatgaagtcccctttaatcattggcacggcggtatgtggtatctttggatgtcttatgcttatggcaagatatactgacaaccccaaagcttgattctatcagcgatgaccacgtggccattctgaagaacaagtatcttattgacttcaaccaagaccctgttattggcagtcctgcccatccttataagtggggttacaatcccgactggactttcgacgccgtccatccagcagagtattggtctggtacatcctccactttacagggcactttggtgctaatgctgaattccgagaatgtgacttctactcgcactgcgacatggagcgaggttccccagctcaagagccatgatgcatatcatgtcattgatgtttggactagcaaggatctgggctgcgtgaagactgagtatagcacctccttggagagtcatgatgtggctgtgctggtggtcaagagacgatgctagacagagatcatcaaagaacaatggctttgttctgagtggtcagtatttagtatcgcagttattgcggtagacaagcacgaattttgagactcattacccgtgacatatctccaagcatgtaatgcttaggttagagagcataaagagcataaagagcatttttcatggttgttcaggtgaggctcaaagagcttaaggggatattggccacagtgaacatagaaacacaatggccatatttaggaaatctataacaaggatatgaatattatccagtcaatcagaactcattacaggatccgaggctggtcgaagaacaaagaatattggcgtttgatattccgccgagtatttatagtctctttatcggctttcatgattatattggcattgttcaaatagaatcaatatattgtgaaaaagaaaagcccccttgagtatttaagtgcttcgatgtcccggcacaatcctcatttctcatcacacttcacatctacaatcacattctcagtatttactaccaaactcattagactaactaacacattgtattcaggactatcttgcagcaaccatgcctgcccactaccactgcaactctcataccggcctgccccgggtttggctaggttggggtgagctgggtaaccgcaaggctcaactccaagctgaacagaacgagtaagtgacaaaagacacacataaaaaggatatatactaacattttattagatatttcgaagcctatgcccctgacttcaagctgctacacccagaccacccccgactcggctggaatgtgcacttgaatatcattcgcaagtcgacccgttggattgactggcgaatccacaagactggagataagcagaagcttgttcttcctgatttggtacgtcctgagcaggtcgacagccttcttaatttcttttatactggtgactattcggttgacgaagccgacttgaaatattattcagttaggccctgccctggtggctgcgtgacttgccctcagatctgtcagcttttgcgcattcatttgtcaatgtttcagactgctcttcttcttagaattactgacctccaggctattgcctttcgcagattccgtgatcttatggatactgctcctgctttcgttttgcagtatgctgttcactcagtgtatagtagggagcctatccctgacgggagtaataactttcagattactggcttaaagtctgtcaaagactatcgccctgagttggtacttcctgcagtccttaggtactgcgggtattatcgactgaatccccagcagcttacaagacacgggaagagagtgagagtttttggtgagtcggagttcgctgagctccgccgaaaaagccctaagtttgatggagacctggctcggggcttatggctcgacactattgatatcacagtcccgaagattcagttcccgggtaactcagagcccatcaggtctctgcatccctatatgcacactctgctcccgccacaggcggtagaccccaaacggtcaaactatcagtatgttacttacttgcagccattgcccttcaaggattttaatgaccagcgaccttctaacacacctacatggaccccgtcacccgaaaatagttccacttggtcttttgctaccgcaagcacctcctttcaaagcacgcagacacgtccttcgttcaatcagagcattcaggcttcagtacaacagacccctgatcctcaattgactctagagcagacagaggacctgagtttcattgacgaagctctaatcgatactactatggaacaactcaccgcgcaactaccacaggaatatgccacgagtccagccgatttgaataatattgactggacacacacgatggactggagtgcagcggatgtatcagatattgatttcagcacgcttttggatgatgatgctgtggatgagccggatgtgaatgcattggacttgacacaggtaatggactggaccgaagaggacctggctaatgtggacttcacacattttttgaatgatgacactttggatctacagtctttcgacccatcctgcctggaccagcctatggatatggatttagacctatcagacccgagtttctttgatctcccaaacccgaaatccttcgatatgacagcactacctgatatcgacttttccgggctgactccacatgattccatcgacactactttctggactcaatcccagtatatggactcaatcttccctgtgggaatggataagtatgtcactttgcctcaacagattactttgctgccagatccattgaactcagggataaacccggacttgaccgcttcgaacctgaaggccggacagtcgatccagtccgcgttcttttctgtgagagccaacccgcgtacatcggtctcacatcagagtcaagactctactcaatctcggtacaatttgaggaaccgcccgagcatggttgatttagctgaggagctatagatttaaatgatgaactaaggtgagtcattcccaactttgctattgagcagtattaattcttcttcttttgtctgtacttctacgcatatagacctgtcttttcacgtgttctttgaagattgagattatctataagaatcaataagatatataaatcagcatcatcatctagtatatccatagtaataataatatagaaaagaaagagtatcagccggataataagcgacgaagtatgtgacttgattctcattgggcacctcacttttgaagcatatactccgtagataggcataggaatagtcgactgcttattcatctcttttggtctgtctttttggttttcaaacctattcagaccttgctctccagataattgcatcttgctcacttcgaaatgtcaatgagccatcatatgcaagcatgcacgtgctacggcacgctaatacagactaggctaggctgccttacttaatcgacactcccacccgtggatccactttcacgtgccccttgatcaaaaagcggcacgaggtgagcactaaaatggatggaagtgccaggcactaagcgatcataatacatgcaactgcatatttaccatgtgtcactgctgtgttgccattagttacaccaaccatgctaattgtatatctaattaagctgaatgtacggatcttgattatgttgatgccaaggggaacccctggagccctggagtatacttgggatgactaatatcggtacctggggtacctgaagggcttaaaccggaaggtgccattttcggcgatttaccatcaaccttggaattagccctagaggtcatctaggaggtagtagtttatccaatcgagctggcattgcttgcgcagaggaaaatcaattagcatggtgtagtatagtgtcgtactcattgtactcatatacatggacttggtggtatgtatacatcgagtcctgaaaccaggatgtccgcttgcagcctgagtctccccagccctaggttgcagatcttttaataactgtggatacagaaaagaaccaactttgaaccattgctgttctatagatcgtgcacttttgtatgtagtaactgttgtatgttgatatctcatgtaaccatggaaatccacccagtccactacgtcagagcgtctgccctgttatctttctttttccatttgacctgaacattgcctacttcctatcgtctcctgtcttttgtccattcccttctgtatttccttgcccctctatataaatacaatgcaatgaggcggctctattccccgcttcgggattgcgtttccccccgcgatgccagtgtctcaccacggtcgcgggtcttcatctacctcggtatagcagtgacattactgcttctatcatatcagctgattctcgaccgatcaccgaatagaggcataagctggacagccattcaggatatcgtggctggcgatgacgaacgcttcgttctggatgatatacccgctgataaagagttggttctcgccgctatgcaggctagcaatatgtcctgggttgaggagcatctgtcacactggaaggtgaatatctatcgtgcagatgcgaaacacgaagacggtggcttgaccgtcccggtaaataagggcaatgaagctatggtatatctgacgtacgtttttcatacttcgagtcttgttgtcatactaattgccctcggaatcagctatattatcgatcgttactggtcccttcctgaagtatcagtcttcctccacggcggccgctaccaatggcatgtcgataacccgctctacgactccgtcatctccatctcccacctcaacctcgccttcgtccaagaggctggctatgtgaatttgcgctgcgcctggaccgtcggctgtcccaccgaactagagcccgctcgctatctccgagagagaccagaagaccacggacatcccaccgcggtcgagtatcccgatcggtttatggagttgtttccgcgcgcagaagtcccagagattgttgggacaccgtgttgtagtcagtttgctttgtccaagaagaagattcacgagcagagtctggagcactatgttcgtttgcagcggtggttgatggagacgaatttggacgccggcatcagtgggcgtattctggagtattcatggcatagtgggttctccattcgctgatctcttgatctcttgctaatattgactgtttacagtgatctttggaaaaccggctcagtattgtctcgaccaacgcaaatgttattgccagacatacggttattgtaatatgaccgacagcgaaatccagaagcagtgggtatggcgcggtttacagctgccaaaaggatggccaggacagaaccaaaccgcggaatagccacgcatgtatatcgcccgattatgcttgaatgaactgaacatttccattagagacctgacctatgtacccaatcatcatttcatgaagcgcgttcctcgtccgctagacgacctcggaccaaatgtctcaagatactgaccctcctattcagtggaatccatatataataatctcaccgccatatatcctgcttactcgaccgcttgtggtatccctgactactcatgggtcgttcttcctcagccggaacagccaggaacccaccgaacccgttcccgacgagcacgctcttgcgagcatcgccgccccaagaccggtttagctgggcctcgtggaaacttacggggcgcgtccttgagtcgcgacgcccgaacgccgggctagggtcgtaaggtgtgaaattccactcaaactcatccaggcccttgctgtacacattcaggggctgcgaaagaccgccccgcatctgcggcccgccttcacccccgccgaagagtcgtggtggcggcatgagcaacagagtatcggggaaggaggaatcacggacatataaatctcgaagagctggtaaggttcgcgacaccaacgacgaaataagataggtatagtatgaggataccactggtggcattccgtgattatccgtttcggatgtgagttcatagtgcaggagatgcagtgacttcgatgccatgggaggaatctgctccattgggaatgagcgagagacctcctggatgatagaaaggctgtggagtcgcggagcggcagaaagaatgtaatgtagtcgggacggagcaacgccagtagaagataatatcaaagaccccaaattcgcacagttcgctggcatggaaagaaatgcgacaagcccgcttgccgtgacattgggggtatcgcgaagtgtaagagactgaactgccgggaatggtggaaggggtacgttcactgcaaatgcagaatcgtcaagccaaccaagatcttcgagcgtgagatcacgaagatgggggaatgaagcgattccgccgcgcagggtactagcctccatttgaactccagacagctcgagcacctccaaattcatccatagttgagagcccgggagacgtgagaaactgccctccgcaccttggcgataggccatgcggcgcagctcggggcatcgagccatcaactcctgtttcaaaggtagacacgatggctcgtcgctatacaaacccaccggcagatcaacaaagcggagattaggaaggacggagatagtgcgggccacgctggctttgttggcctcgcgggtcatgtatggcattcggagtgacaacaccatatttcccagcccctgtgactctcgcactgttcgcataaacaattccagacggacttgcggggcatcgatgggatcgccattgcggtcaaagaaagagcggcgttttcgcttagcggctaattcgatttcgagttcgcagtaatggacggggtcgattcggacgttggtgtaactggcagcagactggtgttagtctctcgcttgacaaaaggcccggggatctcctacagaagcgcccgcgcattcataaaccactgcttgttgacgagggtgcagtgtgccaggtcgcgcatgtcgcatagcatacagccatcgctggcagattcctcggatgtgccatatgtgttatcgacggcgtgcggacaaacaaaggagaaaataagtgccaatactggtcgaggtagctgtttggtgtaatctcgaccaggcacattaacgcggggcgatggtgggtcgggtgtttctcggtcacttcgccgtgagctccgtcgcgagcttcgtcgcagcttatcaaaaaggcccattctggctgggagggtgtgggaggatgtgaaaggtaaagaggggagatgattgggacaaagcgcgttaatgcagggtccgtcaaccatcaaccccccttcagcccccagcccctaacatgaaacacgggtttcatcacgtctaatatagctcgaggatctttgaagatctttcggatgagttgacacgcggcaaaaattatttctcataggtcgaatattatggagacgatttgaggccgcgaatttcatgacatcacggagtcaacagcgtcatttctaggaaatgcctacacaatccatccgatatctatacatggttggccattgactgacatcgatctggacagagactaggagaatatacatttcccttcacactcctcacacccctcaaatcaccatgcctgaaataagtcgcaacttcgtcgatcctcttccctgcccagcacgtaccaacgcaatcccagaatccacccctgtagaacactggaaactcctgccaccatacaaggtgcaatccgaggagcaattcggtcccatcaagtggcgtggaaggtgtttctgtggaaatatcacctatctcttgaagcgagagaaaccactcaatgccaaatactgtcactgccctgtgtgccgagttacccacggagctcctcttcagtgggcggcgatcttccacaagcatgatatgtcattcaccaatggtgcaagcggtttggcgttttattcttctacacatcgaagtcagaaacatatcttgcctaccaaggtgtcttgtgccaattgccggacacctatcatggatgaaggtcggaatatgtgtttgatttttcctcaattgattcagctcgagggatctagccaggagcaaagaaagaagagggaggttttcaagccgacgtatgtgcatttgctactactccaggagtgcatactaatgtcctgctagatgtcatatcttttatgagtcacgcatgctagatcttccggatggtcttcccaaatggagtggaatggcgaatgtcagtgaccggatggacgaccacggtaaccggatcgaagtcggaaagatgattgtataaacaggcgacaaccggatatggacatagaagttgaatatatgtacgatgttcccaaccaagcttgcagtcaccactatgaagccgcgcatacaccatcctgcaccgacaccggatcactgcttgcgctaccccaatcagcagcgccgataaccttaccagcctccgtactatcatccgctcgaatctatcgaaacatcagcattggctccacattgcaaatcaagaaacttacatagtactgtggattgacagagtaccaccaatcatcactccggaatgcagtatccagtgattgactcgccggatcgttccagccggtattgcgagtatcgaagtgagcatgcttcgaccacgacacatacaccttggggtgatcattcccctttacaccgttcggggttttggcatctccggcattgatctcgtcggtcgtaagggtgttttggatatcgccccaggccaggttgtggtacccgctatgcgcagaaagcagggcgcgtgatggtgcccacatgttgtcgctatcccgagagtggatgatcaccactcgttcccagtcactggaacgatgttagagttgggctgaaccacaaggccagaaagggtcacctactagtcatgcccagtgttgatgccagcaaaatttgcgccgtctttctcgtaaaagagattatacacgacgcgaatctcggtctcgttgcattgtcggtatgtatagtaaacgggaaatgcaggtccctcatttcggataccaacgccagggttgcgacaattgcacccgacatctgggtaatcacactgtgccgcggccggtgtcttgtgggcagcatcgtagacatccgatgtatccggtgagccgctgtacgcccaggttggatagcagggtggctggttctgggcttgcccaaagaaccagatgggcgcgtagcggtctgctagatctaaaccaccggcatcgaggagggagctcatctcatcatttgttatctgtgtgagagctgccactgccacatggctgacggccaggactgccaagctagctcctagcttgaactgcatggttggacttgggggaatgttatgggatacaggggtcgcgatttgaattgtccagtatatctctctcttaaatacatactcttggagacagcatagccaggaatatccaagacaattccagagaccattttccaaatggggtgatgagttgctaagggttacatcgcgacatgcgggtctgcatttatattagccccggaggtaccccgagatatcccgcacgtgtgtgcagtagattatctcagtcgctaattattagttatctggcttggattacggagtatcactatagcaccttagaatatacacaacttaagcaacttagagaccgtcgatgtgtatggaattcctcaaacagcggtgaagatggccaggtagatttcaatgggggctacagacggattggggagaaagcagggtagaatatatatatcttagtcgctcagatgatgacttcgtattgcaggcttatgaccctcttcagaagatatcacttcaggacttctcgtttaccaagtacatgcagaagcaatcccccaaaaaacctacaatggtggttgcacgaaaggatgtattgatgatctcctttcctctggccaacagatcattatctcaaacgatgtccgaaataaccagctagcatcatatttattcgttcctagctagtgttattattcatacatctcttcggtagctttaatgcaacaaaaacatcaatagcttatatcaggtgacttctattttgacagatcatgtgatcgatctctggtagatcaataagcttccctagggcgccgtcatttgtcggagaatacacccaaggagtcggacagcatccctgccactagaccttacaccaaatcaggctatatccacactatgtggaggtaaccagcgtctcgaggtctgtttcgactgatatctagaccctcgcccgtcaaatttccatcttgcactgatctagctaccatttgttatggcccttcgaacgcagcttttctggacacagttacgttaccgtggagaatcctaatagaggtctactggatggatgatctcgttgggagaaaagacaagagtagattctgttgtgctgatgatggacagagaggagaggaagagagacaaaggacggaactagctggtctatctaatagtgggtgaccgccttgccggccacccaaaacatccacatctaggtgccggaatgttaactggcttccctttcggcaaatgacgcacgagggcgcctttaaaacggaaattccctatgccttaggctcgactaacacatgtccaactgctgttcacatggaacctttccccacttcagtcatcaaagttctcatttgagtatttgctactaccaccaagatctgcactaggggccgttcgacccgggatcactcccaaggcttcgtcacggatccccacgcctgcctactcgtcagggcatcgtttctaccctgacggcaggtatgggtctagaattttgacaaagttcggcgacaaagtcatcgttgacccgaagcaattggcaaggcttttcaaaaaagtaacaccaggggccgacttctgcccacgcgaacacacatgatgaagaatatcaatgtcggattgacgtgggcgaagatgtcaaggacaagcccgatcactataacgtctaccttcaagtcaatacccaggcagaaagcgttactagtgagccatttttggtaagtagaactggcgatacggaatgacccgaacacgaggttaaggtgccggaatacacacaagaggtgttagttcatttagacagcccgacggtgcggaatccgctaaggagtgtgtaacaactcacgggccgaatgaactagccctgaaaatggatggcgcttaagcgtgttaaccgaacgcgaggttaaggtgccggaatacacgctcatcagacaccacaaaaggtgttagttcatctagacagcccgacggtggccatggaagtcggaatccgctaaggagtgtgtaacaactcacgggccgaatgaactagccctgaaaatggatggcgcttaagcgcgttacatgctttcgaattctgagcggatattagcaggaatcttttgtcaaccggtatgagcacagatttactcacttccgttcggatggcggaatttaaaaggaaggagctagacatccctgagcactcttgcttatttaatgagtctaggcgactgcctatttggcccgtatctcggttcttcagacctccaaagccatttcaaggcgcttgtgagctgaaaggtgattggccttgaggtaatttcctcttcgcgcattcgtaagaaatctgccagtctattctcacgccagtcgacattctctggcgccgaattagcgccgaattattcgtcacgcgctctgggaatcggtcaagaacacaagcaatcaagcaatatctgcattcgcaaataccccttcgtcctcgaggactagcgagtcaggttcgatagcttcagaaatatctacgtattcgttccagagcatttggtggacttgttcattttctgtgtcgtgtttcgtacatatctacatgccctcagaactgttcatgctttgtagccggcagcatagcggcggagagagcccgggcgtaatggagaataggattaatatgtatctgtgtaggccgggcgcgtactgccagtcccgtctggttcgagtatagtagggggttttgactatgtaaaagtagaattcaaaagtggagaattaagtctagcaaaattgaattgatgccttctaccgcgtttccggtttcttggtcttcccttgctattctagtgccacgctgaattaatcccgttgatctgaagcttgacgttctgggtcactccatccgtcgagacaagtcgcgcttcagttgcatcttccttagggaatatctgagccgtcaaagagacctctccttgacccccaaatacctcaacactagaccaatccacgaagatctgcaggttgatacgtttatccgcgcctgctgacagtgatgtgtgatacaaggttgcaaaagtgtcgtcaaaagatgcatctcctgaatttcgccgatccacgaagacctccttgctggtaaagttgtagccgatcagtgtttcttgcttaaagtcagagctagcacggacagcgatcgcaaacgtagatgcaagagattttttggagtcatgatcggaaaagctcaagtcgatcttgaatgccttgccgggggagttcagtttggttgatcctttcgatacggatttccaggaatgttgcaaggtctggtggttggcaacactctgccagttttgttgcggttgttgaacgagggtcaccttcccattgatcgtctgcaatgacaactgacggggaacagacatggcgcttcgccaagggcttgtcgggatctccgtgccatactgccaattattcatccacgcaatctggaccacatctccattaggaagtccgttataactggcagcagcataaaagtccggaccccaatccatccagttggcagaactgtttcctggatagatgctagcaggatcagcctggaaagttgttccgtcgaagtcgccgatgaagtattgtgttcctgatccgaccgtgccaggtggtccaccaggattgagcccaagaacaattacccatttcttgattgatttctttcctttgacgggcagttgaatcaaactgggacattcccatacgccgccgacagagttgtagggtccgaactcgctggccaaggaccactctttgaggttgtcagaactccatatcagcagcttgtggagtgatgccagagttgtgacggctatccatttctgtgtatcgccatgccagaatacgaaggggtcccggaagttttcgaattctgcttcatatggagagggtgggttatgaatcacaggattctcggcatcgtatgttgtccacgtctctccctcgtcgagactataggcgattgactgggattgctgccctgcggtaatagattttccgcttggtaggtcttgagacacgggatactttatgaatcttgtcagtctccatcagtgatcaagtaaaatagccacgcgtaccgaagaagtatacatggcgaccaaaggaatctttccatccactccgaagccactcgtattgttcacatctgctaccgcgcttcctgagaagaacatctcggtgacctcgttgggatatccgcgagcaagtagagcaatcgggtgctcttcccagtgggtcaaatcgctactcgttgcatgaccccacgacatattcccccattcaacaccagccgggttatattgaaagaaaagatggtaagtgccatcgtgatatagcagtccgttaggatcgttcatccaattttcggcaggggagaaatggtattgaggacggtatggttcggtatagtccaggccggacgctgtcccgagcagacccagggccaatgcgagtaatatgcccattttggaattggaggaaagccgctatgcaaaataaacctattctgttctatcaggaggaaattcctacaaaatttatacatctgcgaaaatcgaaaatccctcatcccccacattccatacttcttggcataccccgtggggattccactgccctgcagatctcggggaaatacaaactctcaccccacattcttggaagagaacacttaaacaattggcacgcccggagttaactcgctgaaactcggaagtaatttcggagctgagacatctgctgtcttaatcgggtagtgttttcgcccgcatatacatatcgtggaggtatgtgcgggtgaattatgatgtgatcgaagttgctttacaaatgaagtatgagcaaatgagcgatttatatcattagggtttgccaagtcggctaaatccttgatgttaacttgacgatggttacttggcgtgatgcgattccaaggcacaccggaaataacttgcgccacaatattcttagtctaataaactcggtgagagaaagcgagaagagagatcaagaactgtctattggtatattggactaattgtctcgggagaaaaaagaggaaaggaaacatcttcatctaattgaattgctgagcaagtttgaagtgtagtccctcactcatagtacggcttcgcatttatgagcttgtaggcaacctccttgtcgtgaccgaaaatcaacgtcgcgttgtacagtctttgcagtctgcggatcatgttgagactgcggaaccacgcattgtgatctctagctaatccgccatggggatgacccagcgtatagttctctgcaacgtggaactggtccgaggtccaaataaatggtccatcattgaccaggttgacttgcataatgcagagcccaggtgtatggccaggtgaatggtggagggttatgccctggaaaaggtcaagttgcgactcggtgaaggtgttccactttagctcttctagtagcatatagtgtgaaagatagacgcccaagtccgctccggttgctatcgcccagcaagcgtgcttgaactcttcttcgtggacatagattgggacatctgtgttcacgaaatgctcaagtccgccggcatgatcaaggtgcagatggccaatgatgaccgctttcacatccttgatgtcatttccagtggctttgatagcattcgggagtttattgttctccgagtattcaactcgcggaaagacatccgtgacgggcgctggccatttctgtattttgtttagttatacataatgacgattgcgatacgatccgacaaaccacttctagatcctcagcacagccggtctcatagagaatgaggccaacgcccgggtactcaataagagccgaaataagcactaaatctcggcgtttattcaccggattaaggttgctcagggtgcttgaattgccacctcggaaaatcctgtgcaagttagtaagaaaatcatgactttagcttccattggcaaacacaaaccatgattcatctgcttgaagggcgcccaagttcagaatgtgcatttttgtcccagcaggacacttgaatgctgggactgctgcagataccagctgagaggcagggtcaacggaggaattcatatttcaatttgaatagttgaacaatttgaaatgaaaaaagaaatatggaggaaattaaaaagtcatgcccaatatgccggcagatctgatgaagtcataaccgtagtcttcccccgcatagaccttggtatagcggccgaggagcagacccaccagatgcccagaagggaattgacaaatggaattgacgaataagaaggcaggatgggtcaagaatattgacttggcatttctgatttagttacctcggcaatggtaaaagccctttcaataggaaggtatcttagttccctgttgtatatggcttcttaaaggcagtctgccaactctgccacgttttcgacatatacaatctttagctatgaaagtcaaccctaactagataacatgtaacggatctacgatcttcatctatctttaacatcggtatcccagctgaccgaggtacggagtataagagctctaataccgctgccttccgctatcctggcactgtttctgtgtgcatatagaagaaattagccgtagaatctcatcgttttaaattataccactcatggctgcgcgtctatcgcttaaaaattcaccgttcctggactgaccgatctcgtgacatctcacgagctgtacgcctgcaatatttgccacccttcgatgcagatgcttagtatttagatagccaggctgccaatgaaaaccgtactataataggaaatgtccgctgttctgaaaacaaagatcagacaatcagggccctacttacatatctgccggactgccacgtcttgacgtacaccatttgcagcaggaagaacaaccaccgagcacaatcttaatgtctttctcgtgataatagtacttcatgatacatgcaacgaagataaataagctccgaattttcgtagcatatggagtctatttgctctccgttggtcacgtgtcgtggggtagagggcgaagttgggcagctagcatcaacctctaaccttcgggtggttgcgtctcttcttgttcactacaatttggtacagccaccaaaggcataaataacactattgctctgttggaaacgcgctcgtcccctgatcaagtcctcaagtactagatatctcccgaaagaagtttatcctggaagattttgaaccccaaatggtcgttttcaaatcctgcagtccagacatcttcaggaattcgacctcgcttgtgcttggctgggagctgatgtcccttgataacacacgagtcaaaatcgatgatcacgaatgtgtcggcttcttggcttgcaatcatgatgtttctcgtgtggatgtcattatggattagattgagagcatggagctgatcgagtcccaccttgatctgctggagacagcttttgttctcgactgagcgcccagcctcaaggcagccggcaagcgtctccacatatctctggaaacaaagcccggtaatccgcccccctttcaccacacatccaagatagcgagcaatatttcggtgttcattttgcatcaggacctggcagatacgagcttcctgaagcaggagcacactcaaaaattccgaaccatcatagtcaaggagctggggctgtttgatgtaaacaactgggttatcggcatcgtgacatatcgaaagaccatcttctagcagaggccaaatgtgttcggcaggaatctccttgagacagctttcggcctcaggcagaatctcatctgggtgagcgaactttccaggcagctgagctgcaaagtacttgtcgccatcctggaagatgacattagtgtaccgaagctttgggctgccgccgagctcccagatctctgccatatcacgataatgcattgcggaaagggggaattctggcaaatttgaatcgaaatagatgtgcgaataatagaataggagattgcgagcccgccctatataagagacctaagtcgggcaaccgcatacgcacgaacctcctgtcataccgtaaagtgtagcggtgagatgactgcatcgaacatacaggaggatttgctttttagatgcagagaccataatgaatagcactcatatttggaatatatcccagcatggtggccccttttgggtgtggtctgagcgtccacggatccacggtagagtaaatgctgactaatattaatcggagaggactgatatatcacgtgactggatctgagcactctcattaaagcggcagctgcaataggaaagccctttgtatagtaacctagatacgtcttaatgaggttccaataataaagtatggagtataaagtgtgggaaattccctaatactattaaaagacaaatctcgatacatgttgcccaagatgttgctacactgtatagctctaggtgggacggacacaagactgagaacaagggcttgcacctgttcgaagatgagcagtagtggaatatatattgccaaattgcaggagaagtgaagttatccccaacctttaaaatgtatgttcatagatgtacggagtaccgagttagatccaatgacatcagagaacccacccaatcgcactcttattttcttcccctctatatcctccctcttagcaacatcacatctccatttcagctcatataacatgtcttggtcacagaagacttttactctccctactcgcagccgcggctcctacctgatcaccgaccatgtcctccaggaggtccccgagatccgcgactacaaagtcggcatgctgaatctgttcgtacagcacaccagctgtgcgctttcgctgaacgagaactgggatgacgatgttcgcgccgatatgagcgatgccttggatcgcattgcgcctatggataagaagggggatttgtatcgccattctgccgagggcgccgatgatatgccggtatgtgtttggagatagcaggggattgggcattgattagatcgctatgctcgcttcaggagtctagagtcctctgattatcctccgctgttattttcactctcttcgaatccagcactaattcaacacaggctcacatcaaatctgcgctcattggcgcttcggtcaatattcctatcacaaacggtcgcttggcaacaggaacatggcaaggcatttggtacctagagttccggacgagtcgacacagtcgcaaggttgtcgcgacgatccagggacagaaggcttgactggatggggctgagcgagggcaattgtgatttatctggtttatctgatgccccagctacgagtgatgcaagacgagttgcaagaaaaaaaaataaaggtttgggttggcgagatagtcgacatatgacccggattatacgagatcatcatatggtagtcgatgtaatacacacatttttggggacaataccatcatcacacacgatcgaagagcagcagatccattcatggatattctgtacacggcctcaggcccaaaaccaattgaaaaacgcaaattgtgcaacgccgataaagaaatctcatgctagccgtctatcgctgctccaagccaccctctgtcacacgctgagactcgttcacctcggcagcgtcaccggtaggttcgaggggatagctggtggcaggcagggacttcaggtaagcgcggtgctgttcatgagcctagagaggtgttagcaaagatccaatcgtagccggaaagaccgcggatatcagtggacatacgaaggggacaccgcagtatgtgcaggtagcgatctcgggcttgtcggtgttgatgaaaatcttagggtgaccgagagggccaccgccaccgtcacagctgacaaccctggactttgtccagcggacgggctgtctgtgaatgagctcgatagcagcatatggtcgcggctaaagagtagcatgttagtatcagtccttgaggcattgccaacagcaattgcatgagcactgctgttttcaacgaattcgcacctgggactccatgattgtctgctcaaagcgaggtccaaccatggctttctcgcgcggctgctggctggaggcccaggtggtagcgcggttcggagcctgcatgctccggatgcgctcgccaacctcgggggcctcctggagagtaccatcgttagtgggctcggcattggtcgcggagacattcggcgtgggcttccgcggggtcgggtcgttgacttggatagggttctcgctcagacggggcacggtcgaggagtatgcgcggacaacgaagcgtgggcgggccgacgcaaaggtcgcaattctgcggccacaggacatcattatgggcaagtttccccgggatggttggttatgacggaggataagaagagggttggcaagggaccaggtgcaagtcggcactgaataatccgcgaggtgtggtttggtgggtggtcaccgcttgctggttcgagatagctccacccagaacttggattttctgccgcgtcattttattttgcgtttcgcaagtgaagtggctcgacatctttctttctcctgatttttaaattggggtttgtatccattaagatcatcctttcaacccatcatggctggctcttcctccccggctggaaagcctgagaagaccatgtcgtcaactctattgaccatgaaggtatgaatgacagtttcttggttaacagccatacaactaacactatatcccagttcatgcgacgcgctgcagctgccaaagaaactcaaagcccatcttcggatgctagcccgcacaactccaagcgcccccgtctctccaccgaggctgagagcccttccacctcagatatggatgcgatcgcggctgcacttgctgccgaagaagaaaagcggcaaaaggccgtcgcacgagcagccgcagaggccggcgagacacactgggttttggactttcctgctacaccccagtccactcagcagcctatggtattggcggcagattcgctggatgcagatgatgatacccattccggtggtcggcgtgcatatggcaatttcaagcgcaaagagcgcaaagagcgcaaggtcagtattctatatcttgcacttgatattttgtactcattttttcttagcccgaggacgatgaagatgaagacaccatagtcaacccgtcgaatccagaagaggttaccaaaatgcaggaaaaatctagactcaaggcagaagccaaagcaggaaaaacacgacagacgaaactgtctgaactcactagtatatctggctctggccgagcgtctttgttgggagccccctcctctgacaagaaaaagaagaagcgcaagagctactaaacggatgattttcacgatcccacctcggatgttttgattggcgttttagcatagcatttatggcgttttggggttatatcaatcagttccttctcagtatcacctcctggtggtatatgcttagcaatcaccatgatcgttggcctactaggtatgtacttctttgtgtccaccatacgacaagtaaatcaatatctataagcgacgtagtcagaagttcttacttacaaccgtgtttactctcctatggaagatattgaatcatgtaccgggatattatcatcaagtattattcatcctcttcttataaaccaggtcaacatctatactctcggtcatcgagaatttcggactttgtacggcgatactgacgggagctcgaaggatatttggtgggacttgaaacacagcacaggatgaatgtgagcttacatggatatcgtaataagaaattagtagggccgtatgttcgagaggtgttccataagaacggaatctggaggcagcttgtttgggcggctcattgagacaataatcaatgtacattgtatatactaggccctaggctctgctaaggacctcactgagagcactacatagagttaagtagcgaccggctcttcccaaaaagaagcaagaagatcatctcaaagcttcgccttctcctcctgcttcttcttctcccaccccttctgcgtcgcgaaattcacaatcaaattccaagcagcaaccccaaccccaaccggcggcacagccaacaaggtccaagcccaccatttcggactggaagctgcaatactagccatagcccccctaacagcaacctccagctgtgctttatcagcatcattccaaaccactaccccgcgccccgtcgtcgtcccccggaactccgcctgcgtcgctttcgtccgcacatctccctgactctggacccggttcgctgcatcctcggctgtgagatgtgcatcgcgggcgcgcaaccgcgccgtttggatttcaggatcgtgaaccccgaccacgattacggttccgcagatgagatccatcccgctctcgaagaggagcggtacatccaggacaaccgcccattggccacgcaggtagtggtagattagggctttgtagacttcccaccgtacggcggggtggacgatgccgttgaggacttgtcgatcccgtttgcgttcttctgtgctgccgaaaatgcgccgccctaacgctggccgattcagtggcttcccgtttggatttgtaggcgcatcgtccaatagtagatctggtgtactagggccgaagtagttgacgatagctttgtagcctgcggtgccgggttcgactactttgcgggcgaggagatcggcgtcgattattgggagggagtagggtggtgtggagaggatggacgagacagtagacttgcccgttgctattgagccggtgagcccgatgatcagcattttagctttagaagaggagagtggcagaattgtaaagttgtaagaaaatgaaggtgctgaatgcggggagataaattagcctcggctccgcattaagcacgttttcatgtacgtcacgtcacctatgcagctatgcagtaggagattctggattctctaaattccaaacttcatccagtaactaatttgctatatatccgataacaaactttggaaaatctgtgtagtctcggttgcgaggggtatcctcggcgtgcacttgtagtcgcatgaagcactgcaacttgagagcgcatatacgcagagcaagacgcctaacccaaggcagtgaaaaagcgggcttatatggctgatatcttccatcatcaattcaagtttccggcaatccatgtgaagtgtcttgtacttggcccttccacccaatagccggccatcccttgggcagcgaggagaatggtggcagggaatagcggtcgtcacagccaccttcccatggacaagtcagatcgcacagtccaaacactttgcagtagcattccttcgcatcggggcaatgtacagggtcctttccaaatatcactggagaaaatgtcagctttcgatcggaactgggtcattgcggggaaaacacatactatgccatgaatattccataattcgtccactcaaatcatcctctagcggcgtgtccgctagccatgtgcggaagcgctcgtagtcactgcgcggccgttccagcaccttggtgcgggacacaccaaattgcgcgcagcacgacacgcctacctcctctgggattggcatcccagggaatagctccataaatccatacttgaagtattcgccagcgtgtacattgccgcgatgcgtatccgtgagaggacggatttccaccgggcatccaagggtccaaacacatcgtaggttgacatatccttgctcttgtaggtatggaatctggagattttgtagcggtggaattccgtcgtagtacgggtcgtcgttgtgccattgatagcgtcgcgagtggatgaagagcattgtctctggtagattatcgtaattgtcgatgatgtatctattcaacagctcgagtcagtatgcgagacgaaagataacatattgcatgtcgaactcacgtcaaatacaccatcgactcccggcctttgttgcgcgccaccgtcaatggtgcgtgcttgtcatccaccacgtagatacttttcgtccagtcggggaagtattctgacagccatgacgtgtcatcacttttcatgctggcgacgaccatatcctttcgtctcggtacagcagggcgagccagctcgcctgnnnnnnnnnnnnnnnnnnnnnnnnnnnnnnnnnnnnnnnnnnnnnnnnnnnnnnnnnnnnnnnnnnnnnnnnnnnnnnnnnnnnnnnnnnnnnnnnnnnnnnnnnnnnnnnnnnnnnnnnnnnnnnnnnnnnnnnnnnnnnnnnnnnnnnnnnnnnnnnnnnnnnnnnnnnnnnnnnnnnnnnnnnnnnnnnnnnnnnnnnnnnnnnnnnnnnnnnnnnnnnnngcgacctcgcctgattgttttgtcggtccatcctgtatctgcgcatagctgcctttttcggtcttgacgcgggactttgttgctgagaagaataaaaggtatagggcgatgacgatgaagatggtaaggaagatagccttcatgcgactgcgacgtcgagggccctgaggcccgctaggagcgaacaacatgttggatggagggcactctgcccaggtggtcaagtcattgaggggggagaagttgacgattaacgggaaatcaagggcccagggagctcaagaaatccagggaagacaagtaggatatacctgcgatgttaatcagatactaattcatgtagtatctgtgtaggtaataaatccttgcgattgtcagagacatctaggaggtcgacgtgtcgcaagttgaagttctccacagccaagctctaactaggcgctgcggtgaatagctccgagtccacaattatagcttatagttagcaaggatagcaactgtacagctataacggttggaacatataaaaacaagcatattttcaaattatttagaatgcatatattgatgtatttgatatgatagattgaattgatttaaccacgatatatacatctgaccggtagatattgtctttcccccaggacatactacctacatatccatagatgtattcaccctatttgcatgcatcaatatgtcccaagtaccaattgtgtgctgcagtatccggattcaacgtccccgcatttccagacttcgagcccacgccgacaatgacatcaatatcagacgaggtcaccgtcgtattgtcgccactagtaatccagtactcaggacttgcgtggctaaagccaacagtcgcgggtggcaccttaggcaccaagtcgtctgtatgtgtcactcgccagagactgccctggtctgtgatatattgagctagagccttgttacccacccgtggctggccataagtatactagtctcattgtgagtatacactagcaattaaggcagatttccaaacatggtacttaccacacttggttcatatccgccatttcgaagcacaatacctcccaacgtggcaagggctccgccatagctgtggcctgtcacgacaagagtgtagcccgagtatgttgcctttgcggccttgatcttggatgtcagatcagctgcgacagcctcccaggcttccaagaacccgccgtgggcttcgcaaccgctgcagatactactagcatcggtgaagccaaagttgatgttcgcgatccagttactcagtgtgcgactgcctcggaatgagacaacaagtagcttgtttgtcttgtcaaccgcgaggaagccggcaacatcaccatagctggaggtcctgaaaggtgtcactgtattagcgaacgacttgtgaatgacattggaagttggtctcatactcgtcaaactcgtatagagtagttgtgtcagcggactccaccaaggggcagttgccttgctcgcaagataccccatcgccggtggagttgctattgttcgtgcagtatgatgctgcagcccactgcgagaacagggtcaattgaccgagcacatcagccgacacatctattgcttgcgtcagttggtcaatcatcggatggcatgaacaaaaggcaaacgcatccatacctcgaggaacagaacgagaaggagcagcaaccgtcagcgccgcaagagcagcgatactccaaagacgaccaaaaagaagcatgatgaggatctctggagtagggctttctcaacgggtgtgcatacacgtcaacacaaccacgcagacacagctcccttatgtatgttcggcgagtccaaatggatcccgtatagatcccgaagtccttcacaaatcaggacagcttgaggggcggggtatagcgcccgttctctcgtatattaaattgttgccggactcagctcaatctccgggcttatggcgcatatttcacgcgtgaccggtgggattccggcgggatcgacatggaattcatgcaactgttgagtttgtcaccgggaaatgtaacccctcagagacacatcggctgagtagatgatagtctgcatagtaaaatagcggagtatttcgtccaagtcgagattagggctgtgagtgggacgcttagttgcgccttgtaatgcaggacaaagttttgctgttgatttatttcttcatgcgatataagtgccgtgaagacgaatattttgggctctttgcatatcgggtagaaatagcttgcaaggttgttgattggtttctgcttgactgctccaggtggtgttcgacgatcttttctcatcttatactaatggcccgttgtggcagaagaaattccagccactcgcttccgcccgtgatcgtatctgtatatgaactgttggactgttgaactgttctagaggcaacgtcgaactacgacagtattattaaacacgtgtgatcattagaagcgtaaaattgatttgactgtatccattccattttcaatggaggttttttttggttatttctttttcccttttctctcttgagctctcgcaaagaattccattattggagaagcccttcttcgccagtcaaagccgtatcctgttcatcatcgctgccagcaaagaacctcgggccctcgggacactcggtgcttgggcccatactaggctgcgttagcgtttcattgtcatgagaatcactccccactactggtgagactcgatcttcatgccctcctcaactcctgtcataccggtgtcctgtccatcttctgcgccatcaccgttgaggataactcggggagaaatagtgtagccaggaggcagtggggtgccaggggtcacagcaacgatgttgtcgttctcgtcgaccatctcgaagttgtatcgcgataggagatgggggatggcagaaagttgggggccgtagcgggcagtgttatcgtacagctcgaacagcgggacagccagcagtttcatgttctttgggaccgatagaacctctagaataagtgatgtgtaagcagtgtttaccgcccacgtgaggcatgggttggaactcactcttcttcgggaggcggatgaagtacaacttcttgcactccttgggccgggtgacatggccaggcaggaacgggtacatgaaagtctcgaagttgggtcgccaccattgcgcaagtgtatcgctaatttcccagtcatcattaacgccttcgccagagaactgagatcccacaggtgcaaggcgctcgttcaggcgcttcttgaaaccttcaatctcatcatcctcaggttgcagataatcacctggcctgaaagacaattagcagtgaactgtgaatttatgcaactaaatctcaaagaactcacagcttaaagaatgcattggcaatctgcagcatcagcacatggggatggttgtgctcgtggcacaccaggattccctcgcaggttcgtcgcattccatggaggccatagtgctcttcaaggcgcttgagccgtgccagaaccgaaggatcctcttccggctgtgtctccttggtgccgaaggtatagttcgacagaggatacagccggacagtctccggctgctgagcggtgaagtccttagggacaatgggcctagaaggtttgtgttaggtcgcattgccatttcggagtttcatccatactacttacggaaatccactgacaggagcctcctgcgtggtagtagccatttcgacgaagcaattgttgttattgtcgagaacggcgagctgtctaaagctccgatgtcactatcgcttatcagcgttgaccgccttcccaagttcaactgtggaacatcgagtatacaacttagtaagaataactagttaactaactaactatagcattatttggttacttgatgtaatttagagggcatgctactatactatatagctgtatatataaaaaaaatagcaatgtcgaattaatttaactctgtggaccttgcggttgagaaaccgatgactgactgtatgtaccttttatatgtgaagccctagcaaacggtacatttgacggaaaccctatgttatgttgtacacccacttgtcaaccttacaaggaccgggtgctataatactcgtctgaacgtagtttgtttgattattatccttcactatatccttcaattgacaaacaccccaactctcggatacatgcaacccagaccaacaccaaacctactccatgtataccattcatagcttggcatcaaaatcctcatacacgctcaaatccatcgcaggaacagggccagcgctaacaggcaagcttgccttgaaggttgacacatcggtgataatgacaggcttttgggcctcgccattgccattagccgcaccctgaatgtcactgccagagccaagacccagctcctttaactgagcactgagtttctcgtccagcgtctcaaggacgggctcgaacttctgctgcgacaggccggtctcggtcaagaaattcttcacagcaaagataacctgggacttgtccgccgctgtcgtgtcaaccgaatcgaatgccgtagtgaagcgggcagaatccacgatgaagtctgcggcttcgaggtgcttggtggctacttcgataaggcgcgttctctgttcagctggtttgggctcctcaacctgcgcgcctgcctgggcgttcatgtggatggcgagcttggcgcgtgtggccgaagaggggtcgatgtattgctggtagaatgtaacgagatccgccttggtcaaggagcgcacattggctgcgtcggtctcatgctgaaggaaatcaaagcgctcagatccgatatgcgaccagtaccggccagtctcagagcctaggttcttgagtttctccaggcgcttgttcacgacgctgcgcttgtaaccctcgaattcttcttcgggcatcttctcgaggatggaaccgaactcgcggaggaaattctcaatgcgcgattccagataaggtgccgtgcgttcactctggataatgacccggtagcccatagtgatggcgttgtagcgtgcgccactccacaccacatatccgagctgttccttgctgcgcagctggtcgaatgcaggttcgtcagtcagctgcgcgaacagctggaccttcgatcgcaggacgtcgtcggcgaagagcccgatatagaggaagtactcaatgcagtgattgacgttggccggatccttgagcgaccgggggtagacatagttggcaccgggcggcaagatcatgttgcggcgcaagtaccactgcgatggaggcagagggcggcctcccagaatcttctcaatagagtcggtcatacgcagagcatcctccttgtacaggtttccgtgggccagcacttcgatgtgggtctgctcaagcagctgggggaagaagttgaccacatcatgggactcaacatgctccagctcttcaagatactgctcattgatccagctgcgctcggcaagaagatagcgagtataatccccgacctggtagtaaggctgctggtactcagcattgcggaatgcccgcgccaagcgctctttgataatatcgaaccgatcctggttgacaactagcccatgcatagtgttgagtactttgtccaacagaacggacatcttgtcgttatatccgctcacggaaatgtccaatcccaaaatgttcgccgagagattgtagtctaagccagcaagctcggcgtcgtaggagtattcatctagcgaatcccgaaccaactcgctgtacagctttgttttgatgagattgccaggcgtggcccacaccaatgaattgcggagcgttatctcgacactggccttgggcacccagaaacggtcatccttcttgaaccatagacgcacccggtcgtcatggcgaatcagcttagggttgatagctggctcggcaacctccttcttttctaccgagagtctagtcggtacaaattcgttcttgtgaggcatgtgcacgttggaagtacgggtagcctcagtcgactctagagccttctgaagaccacccaagaactcctgtggaatcttctcgaccttgtattcggtaccataccacttctccttctgatcccatgtacccgggaactcctgggacacaacgatcagacggaagttgtcagcccgcagatagctgagcgccttcttgatcaggtcagagtcaaatcgtcgcaataaagacccgctcagaagccattcgttaggcagtgacttttgcataacgctgctcaaccggctggtgaagcgactagccggggtcttctgcttgaaccggaaattgacctcggcaaggttcttcatctcgtcgaagatccactgctcgggctcgcgttgcttgatcatggcaatatactcgaagacgacgtttgcgacttcctggtatttcttcagaccttcgggggtcaagcgcaccgagatagtgaaaaatgcagacccagcgcagacaggcatggcgcctgcagacagaccattggcccaccccttggtcttgaggtaagaaagaacactgcccgggccctcatggccaatcagatggctgatataacggctaggctgggtttcatgcatctcctcctcatcaagaaaggggaaatacatatccatggatcgagtatccataaccggcttcacaaaaacctgggtgcacatgtccttctcagtgaagggctgaacaccgtcccagcggttcttagccaggttcttgttctcgacatcggaaaagagctcggagacccactgctccagggtgtccagagattctcgtcctaggacaaccaacttcgcccggttggccgagtagtgcttctcgtagaagcggatgaactcactgcggacttccagaccacgtttctgtggatcttctttcagggtctgcagattaccagtcgagaagtggctgtagggatgtttagggtttgaaagcgacttgttcagttgcatcaaacgccacaggtcactttgaaggttctttttattttccgaatccaccgcctgcaactcccggtctagggttgactctaggaaaagcggggcaacaaagaactgggcaaaccgatctaatgcgccatagaggggcgacttcccatctaatgcactcccatttgacacgccattgttatcattcgtctcggcaggggtgctgtctccactggatttcggggcactggagtcacctgtggcggacacttcaaagaagtagttcgtttcagtggcggctgtgtaggcattggatgaaccagagtgggacgccaagtactggttgtatgcattttccttcgggtactaaacaacagggatccggttagcattaaccctggctaggaatatggttgcagtggtaggttttaggttgtaggttgttaatttaccttttttgtgcccataaatagcaaatgctctacggcatgagccattcctggcatatcatcttcatcagagaagttgccaacattgacattcacggcagcactggccttatcggtgtccgggtcatgaactaggagggcctctagcttgtttggcaaacggatgacccgataagaacgatcatcaagctctggtctctccaagttctctgtaatacgctcgatttgagccatggttgggggtgtggcggtgaagtttggggttgaatgggaggatgaacggcgggtccaaaggacggaagaaagaatctgtaaaggtacgggccgcgctgaacgaatactggtcacagtaatacgtgacaacaaatcgggacaagggcgggttgagctgcgaatgagacctttgtgacacaggtttgctgcagaggaccttggaggcattcagttgccgaggggagagggagaggccaatgacgtgactgataaggtcaatgcacctaggaattccagagggtctaagaatgagacgcgttaatatatgcttcgatatatattgagtgggattataaaccaaatggaggggcctcggggtgatggatgttgtaaagtcgactgggagacaagcgatgttgatccagccgggcctggtggaaatactgcccagctactcgaggcggtgataggccctcgtagccctaatacgcgctctcatctaccgatggcgtttttccaaacaaggcagactcgtatccgaccaggattagacttaaaaatataacaatattcccattagcagatagctacatacatcgcagggtcctgggtggctccacgtcgaggctctacctttccccgcagctccgcaggccaaaacacaggggctagtggacacagtccccaccattatatcgagctatcacatacgtatggatccgggcgcttagcagttggctgcacagaggtccaggttaacactagtgtcggagttgcagttctttgtttggctgccaccggggttgacaccctgcgcccagcagatgttcgagcaagttgtgtctgtgggccgcacgacaatcgacttgccggagaatgggtcaccgaagacatctgacaggtcgtaccaaactgtgcctgggtccagggtgtaggcaaagttggtctgagggctgccgttgtacagaccgttgtcaacggtggtgatcttaagcgagatgccaccggaggcactatcgtggtgcagagcttcggtgtagctgccacccgccgggatggtttgcttggggccgacactgccaccaacggaccacaggtagactgggaattggcagtggttggtcacgatagcgttgccaacggcgctagcaagcggtgccatggcggcgacggaggcaataacggcagtggaaaagtgcatattggtaggattcagttggcttgaggtcaagtaataaagtctgttcgaggtgatgagaatatctctctcaggtaggattcgaagccctttatatagtttccttggtggattgagcatcagtttccagtctatacctggttctcctttgatacgagcataaactagattctaaaaggattgctaatgggaagaatgacggttacttaccaaatccaagacacctcatcccaaatcaacctattgaagccttaaccacttgggcagtggtcaggccatccttccttttgtatgatcttaccaaatccccgcatcacacggccaacagttttccaacattgatgtcagtggagatgcgagagataaaagggtccatgggtgtagcgaaaagaatacgatgtctcagagcgctccgacccgatcattggatgtatacattgcataggcaagagcaacaattatgagattagcatgagctttctgcttatgcatgccaagtgtggagagatagaaaaaccaagggctttctggcataacaatggaacgagttgtgtcacgcctggatttctggggtaaaaagtgagacattgttacatacatccagggacagcacgcagatcaacgccatactgagaaagtaattatacgatatgtatgtctaaattgagcagaaatcagctcatactcgccgctctgtcttggagactactaagctctagagccatggttggtgatgtgtcatagtgaagtcccaaatgtctcaaaactccaaaactgtgctgatataactgctgcagaggggcccagggacttcacacctgacgtcttctctgatggcggtggacgagaaagtattagaggcgacaaatatcaaagagagaaatgttttccacaacccgttgagaaatgataagcaaatatagtaacaggactggcaagataatttcatgtcattactagggtatgaaaagagggttcttcgataacagaccgcataacaccatgtacagccttgggaattctacggttcacgctcgccgaatcgatcaggaaccagtaaaagcaatcacgaatcttcgtctgagtcctcctctgtccggtcagcacgatcggatatccacttgaacacttcctccttatgctcgtcaagcatctcgttcaggtccgttttcggggaatgaaccagctgtccgtagcgcttggaaggccgtcggtccaggctagtccaaataccatgggagtctgaaacaaacacaagggagttctgaaatgaaaataatagcgtgagtaatgcatatcattgacgaatatattgtgggtggcttacctcgcggtaccacttcgagagccacgtctgcgtctgggatgcgaccgcgcggacggggtctacagacacgaaggagatcacgccgttgacacgcttgtaaaggttttctgcttggtaattagcaaagctgcatagccggatacccgattggcctaaacatacccctgttgattagcaagttcgacacgccaatgaaagcgttgccgacgccgagcaggaaaatttcggttgcctggttcgcactttggtaacttgtcagctcaatattaatcaatgttcttcgccggtcatcgctcactcgatgtagttgtcccacaagtatccggcaagctcttcggtggcagacgggcggtcctcgtcgtccacctggtatttaccggcagtctaaacccatccaaattagttgattgcccgtataaagggttgcatagcttgacttacctccttccgagttacgaacttgggaatgttaacatcgatcaccgcgtagcccttgcccacgatccatttcacataatccgagagcgaatcggccttttgttatgttagcggacaatctcagtcaaccatcttgggtcacgtaccagccacacattgtgcgcttccaacttattggtcacgggatgagcctgtcccacaatctcagggctagatactgtcaattatagctctggcggttgattatcggaacacttacggatcgtggaagatgacaacaagcggcacacgttcgtgatagtttgtgctgccagatggtgagttcaggttaggatatcaaggttcggtgcaacttaccttgccagaacttgtttgtcaaaggacttggaaatggcggtgcgataaatgtggagcggggtgagcttgcaggtttcatacagctggttcgactggtgaacacggaggatatctagagggcttatcagctctgttgagtaagagatagtctataattcttaccgtgaagacgattcgcgtagatcgggtgagcagatgtcttggggtacaggcgactccaatactgggattggatgctcctcacccggcggactgttgcgaccgcagagtctgtcggagaactgctcaacaaacggtcagggggttcccccataagggtcttggtcacagccagagccgacttggagatagacttgaagttgtatccaccctgtttcaacgtcagatcaagcaagcaacaatttggagaggcaattgacatacctccaagcaaacagcgatctttccattggccaaagtcatgagcatgtggatcatttgggcataacaagctggcgagacaaagcaggcacccagtacatcgccagcggcagcatcaaacccagcagcgactgtcatggtcaataactctatactagataaaaagagggggtatgctcaccaatcaccatgtcgggatcgaattcttgggcaatgggcatcaccacttcctggaaggcgaacatgtaatcgccatcgcccataccctggtcgggccatggaatattgacatttctaagaagcgtgagactttagccatttcattcatatgcttgaggaaaaactcactttccgactccggcgcctgagccacattgatctgagtctccagcagggcctccagggtagaagcgaccgtcttggtagacatgcatggaaatgtaaagaacattagggtcctcgtaaaatgcttgctggatgccgttgcctaagatctgtaagcttggattgttttcaaatgtcatactatgggtctaagcataccatggtgaacgtccctagcacaagttagtatttctgcagtgaccaaacggtgatgtggggtactactgaccagtcaagaatcatgatcttccggcaagcgtctcctagtctattttggcaaacgcgtgctgcaacagacacattgttgaatagacagaatcccatcgcagaatcatgctcggcatggtgaccgggtgggcgaatgacggctatagcatttttcacctgacgttgggcgacggctaagcatgtctcgattgcgcctccagtagacaaaatggccgaagcgaaggtcagattattaaagtagatggagtcacgttccttttcgagctgaataagttcatcgttggccatatctattgatcgagtcagtgaatctatccaggccagcttttccggtagtagcaagacatacctgttgtgcttcgaacaaatgcgtagtgcgcttcatcatggacgagggtgatttcctcctcggttgcattgcgagcctggatccgttgcaaggttttgggtgccaaaggccgactcgattctgggtcgtcaacaagaccggcgcgacataactccttgtagatgtagtagatgcgtctgggatcctctggatgaacgtcactctgtggacaaacctcgcagtggtaacgcatgcgaggatcataacaaagtcctgaggcaagcgacgccagtggaagacccgccttagccatgacctcgtcgtcagaccagtcagagtcgggctcaactaggctatcacgttttgacaactgttcgacggtgaaaatatcaccttcgccgatcttggtcaaatgttcaggaggggccattccggtggaggcgatggccaccggaggttgagattgctcggagccaggtgttaaggatgcaggaatcgcttggtgaatggaagaaggaggaagattgggagtcgggtgattgctgagatgcgtgggaagatggaatcggtttgcagtcaaggtggaggtggtatgggaatcacccataactgtatcctcgtcttcgtccatcatgagaggggaagccgcgggaagctcttgatataattcaagcttggctcttattagctcattaccaagaactaccacaatagaggtgttgagcttgtgttggcaatcttggagctcaatatcaaactaatagtgattcggttgatgttcctggtccaggctgtcgaatgcgctttgcacagcagaataatttgaaatatatcaatcggtcaaatgttccacttgttaaacaaagattttgtttcaccaaatattataggaatgtctgaaggtgcgatttgagcaagcatacggtggtataccaacgtctcctgccgtatgttcgactgacgctgcaatgcacccacagtatgatgaagcaagagtgatcttcaagtgaataatttctaagagagattcaattatagaccttcatgtagtgggtaaaaatgaagaacagaatccaagtccactgagtgacaaagagacaagggaatggatcattggatcccttttgggccagtctttcttattgccagacattcttgaagtcaccgccaaattgaccgccgctcggaatggattggcgtgatatattataattggcggtgagcatttagtatgtactgacttatcgttatcaacaaccttccaaggtgcatggataagaacagtcggcctatacggcctctatacttgatgagctaggtatttacatagttctaaggttagccagaggtgattcagctatgacacattgaagatgatgacttttgtatgaattttcttggatatcttctcttatcaacatctagacagaaggaatgatagatcacagaccatggaatttggtggaaggcataatgctacaaaacgacatttccatatataacatgtgatgtacccagttatatgtttgtacataggtacatatgcaggtagttaagacatgcagcatacttccaatggtcaacatgtaaaagcttaattttggcaagtgtgaaagtgcctcgggattagattgattgtatatgtatatggaggcaaagccattccaaccaaaatgattacgatagtacagctctatagcagattggagaaaatgaattggaaatggttggtttcattaaatgacgttatcatcttgtttttttctaccaggcggagtcctcatgcacccatatccgtaggctgtggaacaaggagctcagcaccttaaagaacactcttgaccccatgacggggtcctgattcctactgggaatccacaccggcaatgtaggagatgaggtcaacaacacggcgagagtaaccccactcgttgtcgtaccaggagacaagcttgacgaagtgggggttaagggcgataccggcggcggcatcgaagatggaggagcgcgagtcaccgttaagatcggtggagacaacctggtcctcagtgtagccgaggatacctaaaatagtttgtcaatatgggttgtagacgtgatcgaaaaaaaagataactcacccttgagctcgccactctcggaagcggccttgatggtggccttgatctcatcgtaggtagcacccttctcaaggcgacaggtgaggtcgacaacggagacgttggcggtggggacacgcatggccataccggtgagcttgccgttgagctcggggataaccttaccgacagccttggcggcaccggtggaggaggggataatgttctgggccgcggtacggccaccacgccagtccttgttggaaggagcatcgacggtcttctgggtggcggtgtaggagtggacggtggtcatgagaccctcgacgatgccgaagttatcgttgataaccttggcgagaggagccaagcagttggtggtgcaagaggcgttggagaggacattgatatccttggtgtaagacttgttgttgacacccatgacgaacatgggggcatcggcggagggagcggagatgacgaccttcttggcaccacccttcaagtgggcactggccttctcctgggtggtgaagacaccggtggactcgacaatgtagtcggcaccggccttaccccaggggatggcagaggggtcacgctcagcgaagaaggcaaccttgtggccgttgacaatgagaccgtcatcaacgtactcgatggtgccgttgaactgaccgtgggtggagtcatacttgagcatgtaggcctattccgacgggaggttaatatcgggtatacaatcggttgggttgaccagaaacatacagcgtagtgagtctcaatgaagggatcgttgacagcgacaacctcgacgtctgggttgaggagactatattgaggatgggttaggatggttctcgggtcattttgttctctctctctctctctctctcctcctgcgggttgtaacttacgcattgcggaagacctgtgatgctgttagtgactgaagctgacctgtgatgatccagagaatgacttacaatgcggccaatacgaccgaaaccgttgataccgactttgacaaccatgattgcggtttactagaagctgttagctcaggtagaggaaggacagacaaggaaggatagagaatggatggacgtactgtaatagtgaagtaattgaagaaaggggaagaagtgggatggagagagaaaagaagaagaggaaaaaatatctgggggagggggaggattaatgaatggatgactgacgcaatggacagatcacgcccccccgtctcaccgaatcaaccctttcactcccacacagcccgtcagatcagaccgagctagatttcccgaatgttgccgttggcacatccgcccagcaacccatttccggtttcatacaccggggaaagcaggaagggccacgatattggggtcctcatctgcccctcggtagctcccgtctaccaataggagcccgctagacccaactgctcttcgggttctcactacgcttcggagctttctcttgaatcttttgcctattcggtgcctatattcgggtatacggagatgagcacgataatcttaggtacaaatatctgtaggcgttcccgaggttgactaaggaagctatgacgatgtggtttggaggggtcgatgaggggcaggaatgtaagtgatacaacataggtctacaacatatagaagggattgtccagttaaacccgtagaattaaatatatcattattattatcttctttcgaacggaaatgctcgattcctccactttggcgggccaaccgtgccgcttaaaccactgcggtggacggatcgagtatggtgatctaacttggtggctccctccgccctgaaaggagtcaccggtatctcacatggggccacgagactctcatggtttttttatttgttgattggaattatttcatttgagcttgggagggatttgactactggggtacccaataactattctaatcattggatgatgatcaaatgccgcaacagcaccaatcacaaaatgagatcctacaacctgtggtatctcactggtaatccctcatgcctaggtggtagctgtgggagcccagacctcatcagcccatatcaacgtaggatgcggagccgatacaccagtggcgcaatgtccagatgggtgccacgactgagcgtccttttgtacaggatctagatcgtacaatctgggggatggcatgaccacaggattcaagaaggattaaagatatagtccaggcccgatccagaaaaggagagtctggacttgaaaaaaaggatgaattatggattatgatacaatggggagaaatgaacagtgtgctatcattcatatcgaccatcgaatacccatagctaggggaaatcaattgatggcctagagcaacccagcgtttgtatttattcctccttgacaccaccgcgccagttcttctcggccgcctcgatggaggccttatcgctcttgggtccgccctgggacatgaagccaccggcggccttgaagggacgggcgagatcaccagtagcgggcttgccgaagacgtagatcttggccaggttggactcgaaagcgcccttgagggggatgatcgactggatgaggagggggttggtgtactggaagtacaggtgcatcacgcccatcatgccgacacccatcagctggctgcggatcagctggcgcagctgagccttgtcgtagtccatgttggtggtcgtcacgggcttgggctcctcggtgctacccatcgtggggggctcaacgtacttgagggttgtcatgtctgggggtatcgcgttagttttggtttttggtcatggagcacgcgatcgatcgacatacccttcttttggttgatcttcaggtgggtgtacaggtggacagccaggatgagaagattagacaggatatagcatgcgcgcaccagcatcaagacttgagggtcctcaaagggaaccttcttggacagctgcatcatcaccaagatgatggcgaggttggtactgtgcgaccatggtcagtttccgcaaagatagatgttcgatttgaatcgaacaattgtcgatcaagcatacatttgaggagacaccattttgccggacacttggacacttttcgatacggggaaatcgttgagtatgggggagacaacgcgaacaaaattgaaagccgcgggccacctggcatttctggaaggtcagggagtcggaagaacagttatcccgacgcgatctatccgctatcgctatctgatggcctgaggcattttatcttgtagcctgatacataaggctagtatatcatgtgacctccccctgccggtagctggtagctgtgatggtccagcttcaaaccagaccagcttatttgcaaaacatcagcaccaccacaccagtgaacttatattttggcttagagttacacaatggtgtgggttatgacaactacaggggtttcgtatgtgaatacggccacggatgccggagacctccattgcaatcggacggctcaaggccacacttggcttccatcatggtctcctcgaataccaaaactcactatggcttctgtctatttttgagatagagaaaaacaagcgataaccttcacagcaactgatttctagatcattcaaatggctccacagagggccatctatacaggcaagaaaccgaatgctgagaaaggacggttcccctttgggactagcgccaagtgtctttttggcacagtcggcgcctggcacattctgacttctccatccatcaacaacgcgcgtattttccgcactctgaatcccctccacgtccccaccacggccagatcgtctcgatttctgtttctatctgctgtacctacctctgcgaccgtcttcgcacatttatttcgcaatggctggtggaaagggaaagtctatcggtggaaagggtggaaagggtgatgctgcggggaaagcccaaaagtctcacagcgcaaaggctggtctgcaggttagtgggatcatggcttgtctattacttggctaggaatcatttcatctgagagtggtaaagcgatacgggcgatgagttactcgatgaaactgcctcgaagacgcgtcgactcggtccctcgttgctgttcgataaggggtagtttctttcgctatacgtgccgtcgcacgccctctcttccgaccatgttttcctcgaatcgccaacggtttcaaatgacgcgactactaacccattttcactctccagttcccatgtggacgtgttaagcgtttcttgaagaacaacacccaaaacaagatgcgtgtcggtgctaagggtatgctatgtcgcttggacggatctccgacgtgacctgtcgctaacactttttcccacctagccgccgtctacgtgaccgctgttcttgagtacctgactgccgaagttctcgaactggccggtaatgccgccaaggatctcaaagtcaagcgtatcactcctcgccacctccagctcgccatccgtggtgatgaagaactggacaccctcatccgcgcaaccatcgccttcggtggtgtccttccccgcatcaaccgtgcactgctcctgaaggtcgagcaaaagaagaagggtggcaagatcgagctctaaatcaacctctgaaaagttccggaaaaaaatgggctggcagcgggagtagtcgagacctcaacacctcgactcccagccctccgaccaatcccggccgcccttttttttcagtcctctcgtctttgtttttcatggcgctctactttgatatattttttctgatattccccggtctttgctttcaaacctgcttttttttcattcgagttcatagggcgctgtaatgggaaaatggggatatcctggtagtgggaattttactgattcgatgtgcttcaccttcactaactatgtggtaattgtaggaattggagtaattgtagaattatgtattgtagattttcacgcagtcgaattccaggataatgcttccgtgatcggaccgattatcacattcctgaggggtcaaatattgatagacacttgaccttgcatataaagtcacgaactttgttggctccacgggggatcgacagggacaaatatgcataactacgataaacaacgcaacggaaccgcgtcatttgttcttggcatctatattttgggttaataggttcgtttttgctattggaaattcagattggaagtacagagtagaggttctattgtcagaatatttacacacaactatgatctcgactcacctactggtaggatagaagtcaggttgaaggtagatggattgaacagtgagaatctgagtacaaaggcaaaggcaatggaaaaaaaagaaattgctggactgcaaagacaccaaacaggaagaggaatcccttcagaatgggagttggaaaaatatatcaacatcactgacacaggaatgcagaaaatgcatccacactgcataaggtagatctgtagaatcggcacagtcgaaggcagcagaatcacaatatagctgtttcagaaacagcagtggtccctgatcaccattccgcgagacgaacgaccaaggggaaagcagtcaaagcacgcggaaaagaaagcaaaaaaaagtgaaaatgaagaaacaggcatgtcacaaccgccttacccggacagatcgaacatgaatttccccgaaagattaggggaaagcggttgtcggggtaagacgggccagaaacattaaaacggatgcgagtcaccccatgtacaaactaaaacagacaagaatatgcaaaatgctggtattgtcgtttcttctgccatcggcaaaatgtcttttgtgtcattcttcgtatgcatcccatatcaccaggaggcgttcggggtcgtggagttcgttccgacacagcataaatagaaatccatggatttgcatgcaaggcgcccgcaatatcagaaagtgttggaaataaaaaaaatatcagtccagaacaagtccagagtcttcttgaaactgtgtgagtcggggaaaagttcaaaagcgttcatccaaaccgcgtgtcttgggctgccccaaaaagaaagaaacgtctaaaacttggctagatcagcgaaacagaggattttctggtctttttttttgtgttgttgtcatctcgtcatccctcatcgaatcgtaagccggtaattcgcagaacagggactcgtaatacaagtcgtattcatctcgcggcaaatcagtcggatgctggcaataaaaaggggagtcgccatcttcaataaattcgtccaatgttctactccacaatgatctctactccggagttggtgcggagttcatcacttccgcggctttggtggccgttctgacggcgaaacccggggcccttgtcgggggtcgggccgcggggttggcggacgggcatgcgctcctgctggccgtcatatcccatactcatgccacggttgcttccaatggcgccagcgttggattgctggctgtcctgctcccaagagaacatgcctcttaagcgacgagggctcgagttggggccaccgataccggtgccgagggagagaccacccaggctgttgaccagcaggttgtcatcacgctgcatgccaagagaggagccagactggacaggggtgagggtcggggtgttggaagtaccagtgggcgcaccctcatactggaggcgggcgccgttggactgcaacgcggcggggaagctagcggaggaaggcacgggcgaaggagtgtaagatctcaggtcggcaaaggacttagcagcccgtaggttctggccgttggcgaagttgccaggagagtccatcacgcccagaaagcccgagttctgtccacgcaaggtgttgaaagtgccagggccagcctcttggcgagcctcgccgaagtcgatggtcgccgcccggttaaggccgcgacgaccactgtctgactggccagagggcgggattgaggacgtcggggggctgacattggcacctgcggcgatcttaaagacttgcacctggcgctgttcgccgctaccacgtgaagcatgtcccaagcccatgttgtgggccagggtgtgaaccgtgcgacgctgagagggggtgaggttgtgggggaagatcacggaatcgcggacagtatcttccttaaacaggagtagttgggagtagtaggaaagggtctgggtgtcgttcaagtccacatctattaaaaaagacatggttagcgacaggtcgagatttcaataaccttaaaacgaatgtgttaacgcaccaattttttggccacgctgggacacgggcgaaggggaggtggccgggatgtgcgaggtgagtgaagacatggagctctgcgtctggagctgcggaccacctcccatcgggcggtgctgttcttccaactggccacggcgttcccgcttctcacgctcgatccgttcgcgctcctgcaggggaagcatcttcttgtattcgactcgtaatttccgaccctgtagctcaaagtggttgagcacctcgatcacggttgctgtttcctcggcggaagtgaagttggcaaaggccagaccacggaagacaccattgtcaaagtgatagttaaatgcgtagggcagggggaggttgagttccgtcatcaactgtaccaactgttccttctttacggcaaaggggatattcttgatgacaatcgcggttgggatcaattcatcgtcatctgcagaggacgcggaggcttccggtcgcatcgcgctgctctgaatgggaccagggcccagattcgaaaatgcttggggcatattcggttgctgatccaaccaagtctggagaagcctgttagtacttttttcctttttcgcctttttcgtacctttggacgagggggtccattgtcggataagatcaaacataccgtggggaggccggcacgtccacgggcattaggcttcaaactggcggaggccgagcggattcctccgagagcttgagcattggcaaacccgttggggttccaagtctgcgagccagatatatcatatccgtagttgttctgcaaggacgggttcaagcgttcgaggcgagcggactcgtaacgcatctgatcttgctcatacatgttggtcggcatagggccgtacgcatcgaactgtcgagacggctgacggtgtaggggttgttgatgcctctgagacccaggggaacgcgcagaatgatcgtgatacatgtcttgttgataactcatcgagaattccggagggaggaatgtgaaaatccaccaaaaccagttttaaggaaataattgtcactactccaccatgagagcgacgcaaggcgtggaagttgaagagaaaccgtcgagggacgggattgtgcggatgttttgggggaggaaaactttggagtaaaagccgatcggagggagattctggggcggagaacgagaaaaaaaaaataaaaaaaacgaccaaaaacgaccaaaaattcaagacacaaatccaagacagaatatcttcacgagatcacgaaattaaaggcttcgttttcattcaaggggctcttgttgctttgctgtttctttttttccctttggccgaaggtgactggttccgtgtgttcggggaatttccctttggaaactggctttcccaatatcaaggcccagatgaaggagacaaaagacaagagagcggggggagagagagagacgaaaggaattcaagagggaaaagcggtccacaggtccgccaagaacggaggggagtaaggaggtgagttgtagaaaagacacaggcacagacacagagagaggagaggagagaagaaagagatgcgatgatgagagatcgagtcctcaggcagaaagcaggtgatccgttagatatgcagctgttttatattaaaccagtaagaaaaaaggatgaggaaatgccatacttatagcaacttatagtcactttatatagtccacctctctagtttatattagatcttcgacttttattcccccctggatctttatgtggactcgcccaatgagattataccatttaatcttcgactgcataaacaagtacaccgtacattgcaagtctaagtacggagtcccggagtggtagatattgcttcatgcttgaatttctagtgtatccccttttcctacatccttctggaatcatcagcatcctagatcagtcgtttccccaaccgttccagtcacctgagtagctccttatcccaattccgaattccccttagtcttttcttttaccaaggagccggtgcctcgttaggctcgtcactaggcgattttagaggaccccgctgtggtggaccactacttagagcttctcatccctgagcagattgggggaaagtatttcgatttcacggagtacggaataatactccagtagtccagtactccgtacttctgacatactcttgctcatttgcagtcccacgggttgcctgacgtatagaagtcggggttcgcgccctgcctcgtgcttttgcaagggggtgcactgcactatactgtatgttggatatgtgattctctatatttgatacaccggcttgcactttgcatatggagtatttatcatggactccgcttccttttaattactgtacgttgtactcccgtactccgtattatctgaatgttccatctccttcagggggggttttctattattactcctgaggttagtttcccccccctaatttcatttcgccccatccttccacccaaggcgaatccatgactcgccaccttatgaacaagccacctgagttattttaacagctctccctaatggttcggcccagtcggataagccaccttattcccccatcggctgctgcagctgaaagctagtatattgtgtcccactccaggaaattggaactttcgtccggtacccacgatccgcgcatcccccgtttctagcgcatgcgtcgaagctcctcagaggctcatatcgttcagctagaacccgctagacgctggttaaaccatttagtggcagtgtcagatcccggtcgggtggagctccggacctcatgtggccgagctagaacccgctagacgctgattagaacatttgctggcagtgtcagactcagatcccggttgggtggagcgctggagctcttcggctcgtggttactaccacaatcgtactcggaattgacatccccgtcttccgtacggagtatggtcgctgaattcagattgacgctagaaaagactacgggaattttggctttggatggctctgattcgctccggttgtcattcccgtaacaagtactccgttctccgtatggttcggggaggttgacaagagggatcgtatatttcacacactcaggtacatctgctgaacctgcacgaccttctgggagtttgcgatcagcgacccaaacccaagggaaaattatggtagtggattgatctacagaggatcgggtcgggtcgcaaggacatccgcgtgcttcaggagaaattcgtgacttaagagggaaagcaaccctggtccctggctagctctatgaatcctaacaacaggcagaccttgaacagaggcaaacagcccctgaggttcatatccacacaatttgaatgaacggaggctaacttggacatccgacatgatcctcaagcctaggaatagaacgataggtagagactaaccacagatattgaactgcaactcgtataggaccagtctggaacatcaaagaaaaaagacaaagaaagtcagacagctgcaccaggaaaaggcaatatccagatgtcatggctgacagtaggctccccctggaaaataagacatccttctaacacccattcttgatctttgaactgagtcaaatttgtgtccgtacgagccattcttgaaccaagataaccggagtcacggtcaaagacatccttgaaacgacaggctgtcagtttcaagaagaaaccaggaaaggcccaataataacgagactaggccctggaatgaggcctgagaaatcaggccaagaagcaactcatcttgaacgtattacaacatacatcgtagggactgatgcaaggcgacaatggaatatgtaatattccaaggcaaagccgtttgaaacgttctagtgttgcatgctaaaccattcgttgatcgcatgcagcattatgcagccttaggtccgctccagtcaaaatatcgcgagttttctacctgtagaatggccggtcgcataaccagccctgttgtgtctttttgatagtcctattagatgtattttttatcgatatcttctttcttaagtcttctgatgtagacggaaaacgcggaaaaggcatgatttgacttttctatgtataacctttgatattgaagtagtaccgtagttaaatatttcatatattgcatattaactacatgcatctcttgaagtaattcaaaatcaaaagatcgacagtttcatgataacaagatccaatattcgacccgagtgagtgacgactgccagacccacatagaaagaggttgcactcgccggattgagacctgagcagtgatgatgatttcacttgaagcaaatgaaaagtggccaaaaaccaagcagataagtctgaacatattttctaggcggaaaggcacctaagtatactgtcagatagggtacgtatattgcgtgtagcaaccacgcggccaagctgacgggctgaaggctaaggcgttcgaagtggagactaacgtccagtttaaaagtgcgggcttttcgcttcgactcggagttcgattcgatttgctcgatcctttcgatttctgatcttcaaccctccgcttgctggacaatgcggactctagcacgagcggctatagccattgcgctaattctaaccctgttttgggtcaaatcccacctcgaatccatcctgcaatggcgaaatgatgaatataattccgatctttatgtcctaaatggcgatgcgtatatcgagctggtctcggcccatactgcgacgcccgcgacgccatcacatacccaaacccggaggaaatggtcccccacggcccgaccaactcctcgtctaatgatagccaatcctgaaccggagcgcatccccgtcgatgtccccggtgctgaatgggcgggggagctatggttcagatctgaagaggaacccgaattctatgattcaaacggattcgacgatgcccaactactcgctccagtagagcataatgatgtcatggcaccttcgtctactgccccttctcgtccaaaggtcactccgaaatcggatcgcatcattattctggggaagatgtcatacgaagacactgattggctcgaggatcagctgccagagtatgcccccatagaccaatcactagtcgatcacaaccgtgccaattctaactgaattctagatggcaacacgcagtttacctcgttgatgaccccgaagcatccctgcaagtcgagcaaaacaaaggcaaagaaagtagtgcctacctgcaatacattttagacaactacgacaaattgcccgagtacatggtcttcctccacgctcatcaatatagcggccacgtcgaattttgggagcaggacaatgtgttgaccgtccaaagactgcaactcgactacctccgacgagttggatatctcaatctacgctgtgactggagtcccgggtgtcccgacgaggtccagccatttcgacaaacggctggtcgcacgaccgagcttgcctttgcgggtgcttggatccgtatctttaacaacaccgatgtgcctgagatagttgctacgccctgctgtgctcagtttgctgtgaccagggagcaagttctccaacgcccacggaccgcctatgagtcgtatcataattggcttatgacaaccgagttggacgacgagacgagtggtcgtgtctttgagtacatctggcacattattttcgggcaggatcccgtgttgtaagttgtagcccacaaaaaaagtccagggaattgatgttaacccgactgtgaacagttgtccggaaaaggctcagtgttacaaggatgtatatgccatggattatgaagagtcggctatgaatttctttgatgatggcatctggggcaattggtacgatgaagcacctatggacgaaatacctatggatgaaatacctatacacccaacgcctgtgaaggaaacacctgtacatgcgacacctacacatacaacacctgtgaataggatatgattgtatttatctaacggatggagagcttctgggatgtatcaatacctggacttgcgctaaagttcaatctgactgctttttagttctgttcctgtatattatttaccttttctgcttattctagccagtcattgacatatcctccccaagtgtactcgatcatagctatactttctctcactcgggtcttttccaaaaactcgaaactgtcaattgcttatactatggactatatcaatactggacataaatcatcgatatcatctgaaaattcaaaggaaaacattggacatattcataaaccatcgagtataccttcactgacttatctctgaccgagctccaaatccgttgactcacagccaagcaaaagccatcagccccatgaatcctaacatggatgtagcaccgggagccgaaatactagctgcagcatcaggagtaggagtaggggaggatgcagagcctgatgaggcaccggcggagtcagaagatccggaagagacagatgaagtagagtcctggctgcctccgctggtgctagaagagtcagttatggttgccgtgcttgaagtagcagtgctagtagattctgtgctggtagatgtgccaatcaaagtagtggcagcagcagagtaggtagtcgtagtaagcgagcaagagcggacaaggtcaagggcctctgattaatgcattagatttattttgtatcttattagtgtattcacattatacacaccgttatcgtcgtcattatcatcgtcgtcgtcatcatcattgtcgtcgtcgtgctgagttatgttatggttgcgcctgtcggtttgatactgggtgatgcaagcggagcagagcggaatctcggttttggcagcatcccaatcacagatgcattggatctcagctgaatctcgttcgtatttggcatcacaactcttggcaattccgacgacagagctgcaggcaggccagcagcggttggggacatcgtcacggtccaacttggatgcaattgcaatgctagcaagtaagagaccgcaaatagggaggagctgctgagtatgcatgattgttgaagttgatgattgtataataaaaaggaatttaattgtgtctttgttcttgaccgaaagcaatggcgaggattcaagacatatttatattgttgaaggttgatataactcttgttcgctaagcccactccaagcaactgggtaatttattttcgctctacatgtagaagatattattgtcggcattctccgcacgcatggtcagagttctgaaatagaaaacagacctccaaggtgtgtccacccttgtatcgaccagcggagtgccgccaatgttgattgtgtaaaagtagctgcctggtttatgccatcagccaagactgcgccaagagcctgaatggaaattccgacgagatagtactaataatatcgtgcatttgggttctgcgttttgtatatttttctatcaatatgcaggcaccgtggctatgctctatccctgactgagctggcccattctgaaggtttacaatctttcacttactccatacttcatacacctctccatttgccaaggaagggtcttattccaccccggagatcctatacggacaagcccacctgggcagtgtctaagccacgttgtggggctaatcggtgcataccattcaaattctgcaaccttgaccataggttaatcgacatgctttgttgtagctgtgcggagtactctatatcaaactttgagttcgagaaatcaagtttaaacctatatcaagtggaagaagctgcccatgtgggttgccgatagccaccattctgctatatatagatagccctgaagtatacaagcgacgataggtgctatatgaatggttaatctccaggcttcaggattcttcaaaagttcttaaattaccgcttgtcagtctatcgacaccattcgatatgatcttggcggcatacccttgacgtcgctcgaagtagcttggtaaacagctagtccagactaaccgactattgataattttgccgaatttgaggagatctagtgggcttattcgagtcgccatcaataacactcacgaaccgacgagatatgaccggcaacgtgtacgagttggccaggacagggctcagtagaactcgcatatttggtcgctatggcctcaatcaccgcgttctggagatcacccttgtcctctaatattttgaatggcagctctgtcctgacccgatcggtcatggaatatacagcagcctgtccgagacctgcagcactcaatgcaaccatagcagcccctgcaacttctttcagtctccgaataaaattgacataatgctgctgccgtggcgatccttcttcggtagctgtggcgttgaggtgcctgaaagcacccttcacacgctttgcttccgtagctttgaaaccccccctttcccccgcaagctctgacacgcccaggagcttacgaacagcctcattcactgtcagtgactttgggcgatttgttacatgctgaaatgatcgggccatcttgtttgatagtaaaacagtgggaggtcctaccgaaattcaggtaagatcgatgggaaagttgcgatgtgatgggctatcggcggaaatcgatcggaatcaatggaaagacgaattgtaatcacgtggtatatcacatggccgcaactatcatgcggtactacgttggaaagactgtgaagagtctgcttggagtgggaagagagctagaatatcctaagaaacgtggctcactacctagccttaaatgtgaggcgagatagtctcagcgtagcatgtgcaaattgaccgagtgaatttctttgacttggacagcgaagcacaatcgactgttacctcacctgcatattgggagcattcggtgtcagttggctatcaagtattctatggcgtaactgggatatcttcattggaccagcaaatcaactggcgttctgaacttgagaagacttgggaagaattgataattggcttcgaagacgcacatatgttgcagccacatagttctttcaatgctcctattggaactatcaatcttcctggctatactagggtcgttctaagaacttgtgcagaaacgggtgttgcgttgtgtctcgcaaccacggaaatcaaattctgatgctatatatactaagtattaccatcgtatataagaagaaagagataaaaaatgttaggaattgacaagaaatatatgtggtttgcaggaataactagagaaatcggtaaaaatgggtctatatcggcagtttctgaagtattcccgtgactttgatccagagtccataatcaacttgtgctcagccgcgattccgatattgtcgttgctatgaggtgccagattgactaagaagaaagagcacattcaactaaataactaagatagagaaagaatgaagaagtacattgcaaagtagaagcagttgatatagttgagcaaacttcgaacgtctggcttagctatctaacaaacaatctacttaactagttatgtgaatgcaaactagtaagcgagcaagcaagcaaacttgaatgcctttagggttgccgtgcccaggtgaaacctaaccatgttgttagtaagaaagcgttgaggtggacccccgcaatcataacatcatttccaagttaaacgtacttctgctctcatttctaattcaaccaaagctacccaattaagtaccccttctcaattcccccatcgacatagatgactcgagcagtcgggaagatgtgggaaaaatactgcttgcgtccaactcggggcactatctccaccaccatcccagttttcatctacggcacagcctggaagaaagaccgcagtgctgatctggtttatggtgcaattaaagccggttttcgggctgtggacacagcggcccaaccccgccattaccaagagcatctcgtgggggatggcatccgcagagcaattgctgatgggatcgtcggccgagcagacttatacgtgagtggacagctgcgatttttaacttagatatattcaggattgatagctaaccatgattaggtgcaaaccaaatatagtcctgtctcggcacaagacctggccaatatgccatatgatccatcagcgacggtgactgatcaggtccatgcatctatcaaatcttcattgcataatcttcgctcaaatgttgaccccgactccgtggatgatgcctacattgacaccgtgatcattcattcgccactgtcaactttagcccagaccctggaggcctggcacgcccttgagacctatgttccccatcgcatccggaatttaggaatctccaattgtacattgcctatactccgagaattatgtacgtcgtcgcagacaactgtgaagccatcagtggtacagaacagattctacgaggatactctgtttgatgtccccctgcgcgcgttctgccgcgagaatcaggtcatctaccaaagcttttggactttgacagcaaatccggacctcgttcgctctgagccagtgcagaaacttgctcgccatgttaagataactccggctgctgctttttatactctggttatgggcttgaaggatgtggcggtgctgaatgggaccaagaatgagtcgcgcatgaaggaagacttgtctgctcctaaacaggtcgaggatttcacacggaagcaacctgagttatggcaacagattttgacggaattccggggtttgataggggaatctagttgcatataaaaacttgagcaagccgtgtcaaggcttctgcggggaacagttagtgctcaatggtagtgcttactgcaaaaatcaaataatcgagtagatgtaagtatgaaatggcatcttgaaattgcaattgtgaactctaggctcacgatcctgagatagcgaccagttcatctgtactgatacctgacagacacgcgcgatcacatggcaaaatgaggtacttgtaagtactcgtcaccacttatcttgctgactcagtcaacgccatccgtggccggaccggggcaacttggatttgccgccgagtggcatgagggttcatatttatcttgttgacaatatagctgcattcgtttgattttctcttggtcttcctaccttgtgcctctagagctaaatacttgccatatcaactcattcaccgcccagtgggcgctttctgctgcagcctcccgccttattctggatgttggacaattcacgcgcccattgagcatcatctgcctagtattgatcactgctggtccttgatttgccgcctgctatcgattcctgtgatccttcgtttacttcagtgtcgatacgacaaatttcgcgctctgctcagtgttatccactttttccacctctcgcttctgtggtcaaagccgtcgactcaaattagaaccgacttggatgaaaaacttcctgcatactgagttcgcttccggttcctttgtctcctaggcaaatttcctgcggccaactcagtctcctattcagagactaaagaaaatcgagatacaattctatatcgaaccccaccgcgataagagtcattacgccagcttcttcacgatgagctcgcaaggaatgacccgcaagagaccagcaccgggaacagtaccgcccgtccatcctcagatgaaccctgtaccgaactttccgaccactgcgaaccccgggtctcagctctcgaacgatcaattcttacaatggggccagaacccccccgtcaatgccatcaatacctccgccttctctgatcccacctacaaccccgtggccttttcctcaccgcaggatgtctctgcacctgctgcgacagcatccaatcaactcgcccgccgacaagcgaaccaggtggtcagccgaaatcgtggctacgagcaacctcctgcttcatatgtggaaaatggaggcaacaatggaaatggggagagtggcgcatggggggagtctctagaggagctctatcggcgagccttaactgcgaagagagattcacaggcaaaacgaaagcaaatcccgccatttgtacaaaaattgagcaggtatgatccgacctatcgctttgtgatcaattatagggctaacgaatgatcgcagtttcctagatgaatctaagaatacggaactgattcgatggtctgatgatggcaattccttcgtcgtcctagacgaagatgaatttgcgagaacattgattcccgagctcttcaaacacaataactacgcctcatttgtccgacagctgaacatgtacggctttcacaagaaggtcggactttccgataattcaatgcgcgccagcgagcggaaaaacaagagtcccagcgaatacgccaacccctatttcaaacgaggccaccctgatttgctatggctcatccagaagccaaagaacgctgggggtggcggacatgcgagcaaacctagcaagggcggcacgcgcgtgaaaacggaggatattgaagataacgagatggacgattatgtcgaagagggtgcaccggcccctcgcgatacccgtgctccccgaccacagcaattgtcattagccacagacagctcagtacccaatgatcaactttctggagtgtatcgcgaacttcaggcgattcgtcaacagcagtcaatcatctcaactacaatcaccaggctgcggaaagaacacgagcaactctatgcgcaggcagccaacttccaagagcaacacactcgccatgagaactccatcaatgccattttaacattccttgcaaccgtgtataaccgcagtttgcagggggagggcgggccacaaaatctcgccaattcttttgcgggagccatctcgcaggaccaaggaaacatcgtggatgttgatgatgactaccttaacaatgctctaggatcaatggctagcccgagtgcccagagaacaatgaagaagccgccgctacttttgaaggctccgcccgcagcgcacgcgtataataatcgaccctcaacaatttcaccgtcaggcagtggctcctatgacacgcggtctcgtggtcatgctcggcaacccagcgccaaccagcacggccatgtggaggaggtgtttgaccacagcccacgtactgcaaacgtttctccgggacagccgacagaccagaattcccctcaacgggacattatgtctgtaatccaaaattccaatgcacgcaatgggctctcaacaaacttctccgagttccccaatgtgctctcctccctggaaaaccacggtggtaatgttcccctcacggcaaatcaacgcgccgatatgcttcgactcatggccaacgaaacaaattcatcagaacccaacgctggcgtatcgcccaacaacgcgcttatctcgccgaatccaccccttatgccgcacaactactcgggcaggctagccagcacacgacaagaaatcgacaacctagtcaagatgcaagctgagcaggatcgttctgtccagaacttgactagtcttctccagccgctgagcccgaatggcaccatccccggtatcgatagtgagggcaatgtacctcctccgccgctcgaccttgaccaaatcttcaacaacgactatttcaccgacattggagacacagggtccgatatgaagaaacaggagaatccaatggaccatttgggggcaggccagaatacacacgatcctatggggaccacccaaggcgatgataccaacgacctgttcgatttcgatcacatccctaccgagcctgatctttttgaaacccctcataatgcgcagggtgatcccacctacaactatggttttgacggtgttggatacgatgaatctgggcgtgtgatcgagcagctgacggatagcgaaaccaccagccccacagccacgggaaattcaagcgaagctgtaaatgatggtggtagtgcgtcgaaacggcgcagaaaggcgtgattctgccgatagcatgaggaagatcagaacggagcagattcacaaccacggtgtggatgtggacaaaactttcggcgattaggcgtttttcttgttgatatgaggtttcacatacctggagatgtgactaggctgtaaaaacctatgatgatccatgaatgaaccaattcctggaattttaatgagatacctttgctttaccttcttcttccttaatgagtttaatgtacataggtagaggtctttccagaacttttcggaaccctcgctcctccctttttttctcccagttgcttcatcatcttatgagtccatcgagcactgactttctacaaaacatgtgccatattgtgccaacggttgatcacgagatctggtttgcctttccacgcccttcgaagctccaatctatcctcaccttcactcctagctcattagcaaaaacacgaaccaagccagggttctgctggaaccaacgcctagcctgcactgcatcaatgccaggttgcaccagcttctcggccagaggccccgtttcaatcccgccgacagccgttatccatagcttgtcgcccacggctttcttgacctccttggccaaatgcacctggtaggcagggcccggtttgatagcaatcgcgaacttgtcttgggatggatgccgcctgagctgatattcaccaagtcaatgccacattcggctaagagtgggacgagttgaaccgattgaggctgtccagctctcgggaaagtctttcttcaattcatcgttactgaattcgaaccaatcagtcgcactaattctgatcatatagaggcattgcttccgggatgctagcgcaaattgcctccaaaacttctagcagtagtccgattctgttaacgcttccattaaattagcggagcactggttcagtagtgttatgcactgatcacaccagaggcgtgaccacaccagaggcgttgttgtaaaacgtaagcctgtggcatcaccgtccctctattattctcctcccaaatcttcaactcgaatctctgacttcaaccctctaactccctcgctaactaactctgtaattgacttgcaaatgcctccgcgtcgccctcgaccaaagctctctctgtgggtccgttttcgaagatggcttcgctactggagctcacctctccggctacgcggtagtctcattcgactcaaacaccaacacaaataccccatactgacgctccttcgcttgttcattccctatccgtcctggtacttcccgatcccggaacgattttctcttcgcgaattgattgaagacgaagaaaatgggacggggataatctcttcccattttggcgccatacataatcttcgctgtattccgatctggcgaatgcgggacacgccattacggtctatttaccggctctacgagctccatctcgcggatcggtatgagctgatgggctatgaaaccgagtatttctttttccagagaaactggaagcttggagatataccagacccgagagatcctgatccgcttcgttatgcgatggtcgcttcgatcacggaaaaactacacgaagcagtcaactggaggttgagcctcggtctgcggagaaatcgggagcacgtctgtcgggaggaggacggagacccatggcctcctttcatccctgaagaactgccagactggacgaaaagtgtgccgcctatggataaagatctattgagacgctcagtaccatcagagtcactggatgccgaggggaatctggtgctcgagaagaatggcaaaggccctaattttgcacggcgcaatatcatcaccaacacaggttggttctatacaatctaagagcacacttgaacagttgtcatatcaatcatcaacttcatgggtcgaattcaattgaatcagcgagcgctagcatccgtgacatcctctttgaagatatcctcgtcatattcacgacgttgggcgtcagccacttgatgcattgtcctatagtcgggaatcacgtcgaacccgttcatattcattgtctggatggtctccaaatccagcgggccattatttcgggttctcggttgcttcaaaagagcaactgcatccgtcagatctagatccgcctttcggtctcgcttcgcagcatatatcctcctcaatttgcgctccagggcccattcaatcggagcggccaaaatttcgaggttttctcctttgaacagcgttatgtcctgtttctcggctagttcaaacaaggtctgtcgagtcttcttcgttacgaagatagctacggcttcgttgatccagtcagtggggaagtgtagtttctctgccacagacatgacagcctcatggaaagcattctgtatctccttgtcatcggcaaactcgggatcgatcagataatcgacatcgcctgtgctctcgcgattcttgagataggacaccgcaaggaacccacccgcactgatcagtcggatgggcgcgaatgcaatgagccagtcatcgcgacccattgcactatcgagtgctagaaggcctttttcttttcgtaaagttggcgccaaagacagcctctgtatagtactgtttttgggtgtatcttaccctcttcaaaattcttcgaatcgagatatttctttcgatcagtcatgatggacactgattgaaaaaacgagaagaaatatgagtttagccgatgagatcgaaaaatggacaggagatgagatttatatggcagaagccttccaaggttagaaccccatacatcgtcattatggtgtgttgctttcaatcatcattggacacatgggatacaggatgcaacgaagctgcgaggcgaacagaataaccaatcccaggagtccctggagatgcgcgtgtcttgaaactgcctttttgtaacgttggaagacgccggcacttacctgcagggcatgtagcgtctggctaataatatccgacaagtaagattctagtacatatgtgggatcaggatattgataggctaatatggaaagacttgatattgagagaaaaagatcattcagcgccccttatcccattccaaatcaccgactcgctctcgtttacgctcgcgctctctgtcgcgttggaatccccgctttcgcccaaccacttccttctcgcgctcgcgaggatcaatcaccataagtgaatctgcctcacctccatgctcgcgcttccagttcaagtctttgcctagggtatctttcccaaaccggagttcatgcgagagccaaccgccgtcttgctgttcggggtcgtccgcctctgcctcggggtcatcccatgcctggcaggattggcagtttgcaatgaagtgcaggtcgcagagttgggcctcttcgtcttcttcgtctttcttttgattttcggtgtctttgtcgatgtgacttttgctatgtgatggtgtggcagttggttcgggtttggctccttcgagcttggctttgaaggcgttaaagagctgcaatgcttctcgttcagcggcgctactaggtcctgtcccgttacgactggaaccatttgcggttcctggaggtggccgtttccgtcctcggatggaggtctcagggatcatggcttcgagtgcagacttctttcggcctgtgtccttaggaaccaggtcaacgtcgcggcgcattgacgccatcagagcggcaatctgagcgtttgtccgcgacagcttggactcctttgcgggtggggcgtccggggtcggagaccgagtaggcgactcagggtcaggcagggggagttgtgtttctggatctggtgtcgttgggcgccttttacgctcggtagatggcgatctatctagagatggcgaccggggccgtttgcgcggctgtgatggagcatctgctcggggtttggggcttgatgcgtcgggctttgcacctggcgcatctacgaccaaattggtgttgaatttcggcttcgctgggcgcatgggtatttcttcgtctccatcgtctccaaagctcagaagcgtcttcccgcctttgggtcccttcttctttttcttgggtgcacctttatccgccttcccggcagttgagactgtctttctgtcctttaatttgccctccaaaggccccagttctccaacctcgcaggatgtcaccttaatcggataaacaggacgctcggtgcccgcaatgcgctcggcgtctgcaatcttcaacacattgtagatactgtccccttccagtctcccaaaaattgtacattgcccattcatctcacgctccgtgtttgctagcgtgatgaaaaattgactgccgtatgtcccgtcctcgctcttggccattcctagcaagccacgtcggttgaaacgtaaccgactgtgtagctcatcgcgtagaacgacgcgctcatgcgggtcccgagcttcaggatcaaactcgaattccgggtattcatagatagaagttccgccggagccagtgccggtgggatcaccgccctggatcacaaaatcgggggccacccggtgaaagattgtgccggcatagtagttgtccttgcagtgctgaaggaagtttttgcaggtgagaggggcctggtttgcgaagagcgcgagctggatggggccaaccgttgtgttgagcgtcgcagacgcagtgggattgggctcgctggcgtattgggtggacatgatgggcaagtaagctaccggtttacggcgcgtgccacaagtgaggtagcctgaggatttggagtgtattcggggatagggacaccctcttatagtgttgcgattcaatgtgttggtttctccgatcaaaagctcggagggaacgtcatggcacgtgacgttgatctagcccttatttacttggtgtctaaggacagttttaggaacataaaactaactgaacaaggaatgagcatcatttcttttgacttcagcactacgtgacacatttcgcacatttcctgcagtatcggaatgagaccccaaagcacctatgcctggctaggcagcatgggatgggagtttgagcgttgggcatggaattttgtcgcatttgggaatgatcaatagcagagggggccaagacattttcgggtgggtattttgatttgctggtgggcatgtcgagcgcatgctgaggattatcaggattgaatgtttggcagtgggtgctgtaggtggttgaatgatccgaggaagatccactcccggctcaccgagtcgtcagtccgagatcttgctttgtgaggagatatttgtcgttggcaaatgtcttttttcagttgggcagtcgaagcttgcgtcagccattgagaggctaatcttggaaggacatgtcggctagatgggatccaagaaaatggtggagacttgggatcatcattaccggagtgttgataaagatcgagatgaacggccgtaggtaagtcgcatggggagtggtccagtattgtcgcgtagggtaagattactgataatcgtggtgatttatcgcgtgggatattgcttgatggaacccaacggaagctcaagcttcagttccagcaagtcagattcacaccggccgtcccctccgcccggggttgtggaacaatcatctgcttctgcgtctggtcctgttcctggtgctgctcttgatccgaagccctagcatgaaggcctaacttgaaccgcagacggcgcaaagtgcgttcggagatagcgtaaccttctttctgcaacatgttgagcatggctttatcggtcagcctatcctgtataaaaagcatcttaatgcgcgcatgcaaagcctcgtcgcctgtcgtcgtctggtgtcgcttgcggatgccccatttgcgaaggcgggactggatggttcgttccttgacttggatattgtgacaactttcgagggtacggctgatagagtcgctactgatgccatggtggtacagagtaatgatatcatcccggtagggttctaaattgatttgttggcgaggcattctggggttaagaagagaagagaaatgcgaagagaagagagttggggagtttcgagttgttgacccaaggcggtgaatctgcggaatagtcacttgtcttgatctggatatcgtgatgtttttcgatgttttcgaggtgagacagatgtgattgaaattactattatgctcattggcttggccagggacctgaaactgcaaatcgaaagaaattggatcagatacgcttcacggaacatcccgatacgattacatactactctaggctctcagatgtcatggattgtatagtgcgaaaaacagattcaacttattattgcatttcatagattcattacgcattgcaatcttaccaagcaagtcacaatctcgggattcacccattgatctgatccattcggagaaaccaacaattcaaacctttttacccgcctccatcacagacgagctcatgacttcagggctaggactagccttgttccgctttgcaatgcggaagccaccaagtaggaagaagatagcctgcagaccaagaatcactgcgagggtaaccatggcaccaatgacgcccgccacagcgagtgacattcccgagccaccagtgctagaggtactagcagagccggagtcgctgctggtgctgtccgaactggcgcacttgccgtcggtgttgccacacatggtacaccactcgtcatcggaagtaacggcgatcgccttggtcttcgaggcaaagtcgtcccaggaaagaagctcgcttgattgaccgtacaatgggtatacggtaggctcagaggaaccggttatggtaccattgtggaacatgaagcgcacgctcaggtcggacttgtcagttgggaagtcggtgccactggcattggtcaccagctcgaagaccattgacgaggcgtagtccgggattccggtgaagttgacggatgcagcaggcatctgcaaaagaccgaaaagggagaagatggtgccataggagccgaatccgatgctcagcttggacgtgcccttggtagtgatggtttcgttaagtccggccaggatttcgcctgccagaacggcgccgtcgatggcgcgcactttatcggaggagttataagccaggttgaattcatggcttccagctagagcaatgagctgatgatatacctcgtcggtcaggtctgacttgtgagggaattgactggtagagttatggatgttgccaacgttcaagtagtcgaagatggtataggcgttcttgaatgtcatatcagacgaggcaaatgtactgtccagcataggcgaaagcgattggtagaactccttggttgaggatagcagcgaggtgtagatttcggagaaaaagtagttgttgctgctcacggtggccttctggcatccactggagccttgcaaccaggtggaatcctcggcgttcttgcttgtagtggcaggtatcagctgaatgagctggtagccgtttaatggtgcctcgaccgaggttccattggccagggtctgggaagccacttttcccacggggggatagacgccctgtaggaagccagtggcagagttctgcagcacagtatccgagggagcagaggcactgatctgctttgggttgaccacatcggcactaatgccctcgatctgcttggaagagttcgacaagatgtatcgctcgttgtaaaaagaaccggtctcaaagacctcccgatagcccaggtcggtcaattgagtactacccaagacctttggcgtgcgatctccatggcgggcgaaaatatacgcacccaatacacgctcagcatcaacaacgggggacaaagatgcagccagtaaaaggccagactggatagagtaccgcatcgtgaaatattgggagtaaacaagaaattaagaagcagcaaaatctgcgggggtttaccttctttatctagtcgtggatgtcaatgtcaagctattgcgggcaagaccccttgactcttccgatttttcgctttttttttcgcttcgagacccttgcgattgtaagcttggaagcggggaaagaagataagtccctgcagtgtctgagaatagtctagtggacgaatctcaccaagtcattggttaatacggagtctgaagggagtcaacaaataatcattagctaattcttgggaaacattgcatctccgcggtaccgcggagctatgatagcgtatccatacatagatagagaagaattgacctataacagataataaaaccgttgactgcttactaggtattaaatatgattctcagatcgaatttgcggatattcggatattcttgttcctgttcgcgctccagactccatccagtacccagattgtacatttatatcgtgacataaaattcagagaaggttcagatcgtatcgctggtccttatgccgtcgtgacacccttggcacccattaattcacatccatttcgaactacaccgacgagccctccagtctgaatggcttcagaaccaccccctgcaagtcgccattcaatctcggccagtccttcaagccacgtgatacgtgtttgggcgggaacttcgagctgctggagttgatctgctagcgcggaaaggatgtcggccaaagccagacccttggtggactttagggtttgcacggtgttcagacaggaagtgacatcgctagtggagaggatggtagacatgatttcttggatatcggacgggtgcggcgcggcaatgcagtcataaatcgtcgcattggtgacaatttcgggctccggacgaggggctttcggggcgtctctcatcggcagcgggatacctaaaagataacattagacaattaggatgaaggtgaccaaggagagaaaggacatgagcttactgctggcaaagcatgcctgaagcacgtttagggctcgtcgcatatcacctttgctcagggtcactagactgtcgaccgcatcgggctgtatcctgacaccctcgttctcaatcactttgtcgaccaaactccgaatatcggcttccttcagtggactgaaccggaatcgagtacaccgcgacaggagtgccggggacagcttatgtgtgtagttggcaatgacgcagaatcgggtattggccgtgtagcgctccataatacggcggagagccatttgtgcggtcgacgtcatcgcatcggcttcgtccagaatgataagcttaaaacccgccagaggggagccgggagtgccttggggggccatggtgaagatctgtttggtgcctgttcgtattcacggtaagcttgtagttcataactcgagactcctagagcacgaacttgcaaaggtcttgatttgttctcggacaacttcaataccacgatcatcacttgcatttagctccaaaaccatctgtcgcatgttcttggtgccgtagattcgccgcgccagggccaggatggtagaggtctttccggttcctggtggtccatagaggaggagatgaggcaatcgctggacgagaatgttaatcagaggctatcgtacatccggcatcgtaggcattcgttacgtttgtctccacgaaccgattgatagtcgcgaggatgtcttgatggccagagacatcatccaggctgcttggtcggtatttctcgaccctgggaagggtattagtgatataacacaatcgaagcaattcctaaaactcaccatggcaaattatcttgagcttcgactggcagatcagcgacattcctcttttttccactggcgttgtcggagctaaattgcacgtccttgggcgcatccacgtccatttcatcctcgtaatccgacatagtgaatgtctctctcttgggtagagataaatgatcaatatcaacaggcctatcaagagcaggtaaaccgtgaaaagtgcccaaaaggtttgacgcgtggagcgcgtaaagaggctcggggcggaaaatcatggagcttgggaactccacagatgacatccctctgcctaacctccaacgggtcaacttgtcccctccgcggtctctttgattgaacctcctacgttttaatcatttgacgctttcaaaatgcctgtatgttccctacctttgtatttgtccaaagcctgttgttaaccctcaatgcaggcataccactccatcttcctggaagaccgcgatgtccccgtgataggtaggagactcctatcaagtctacacagagttcccgagctacaaatcgacatttcaaggaccaaattgaccatcgaatttctcctgactaggaaactttcccattcttcccctccgaacccgtactcgcggccccgcatacacattgcccccgcttcctaacaccgacgacctcgatgtgtcgcccgaaagtgaatcatatgattgtgtcgatgagatcctatcgctcttccgtgccaatgtcttgttccgcaacttcgagatcaacggccccgcagaccgcatgctcatttacgggactctgtttattagcgactgcctcggaaaggtcaagccaactatgactgcccgtgaggcggagaaggtaaattttgatgctatatatcaaaagcctgatataacagaatgatcattgacaatcgtattcctaggccctgaccaacgccgccctcgacagctttgctattcccggcgatgtgtcgttcccccttaaccaggcctttgaacccccgcgtgaccgccaggatgccgagacgcttcgccagtgagattcttgatgctatacattgcaactcaatatcagctaaccggttcttgcttccaggtttatctcgcaggtgcgacaggagatcgccatccgcctacacgctagattataccccggtggtgtcgggccatcaaaggtaagaggaaggaaagaatagactcctcgatatctaccaaatactgaccaactctagttctggctgagtttcacgaagagaaagttcatggggaagagtctctagacgacgagcgttgctgtatattgtttgatgaaattcagcgcatgaatgaatttgatacttgattcaaaatcacaccaagcgctttgcgtaacttccagaggcttggatgggtctacttgcatatctgggagtcaaaattgccctcggactagcccttactcgatgtccaaagaaagggtagcagctagagcaagtcggatcacacgaaagatcagaagtaagttgttgtaattgtacattaaaatgctattggaggctattttgagggcgttcattcgtgaaacctaggacgtcatctccacatctcgatcactgatcggggtagatgtcgtttccacctttcgtctcttacgaacattcccagcagcctggatattctgggtggtagggaacacgcgaacgccatggaagagatatccctctgcgccaccacgtccagtcatgaggggatgggtccgaccgggcagtacttgccaagggcgcacacgcgacgtttgcaaggtaggtggaagaagaatcgtcggatcaaccacaaattcttcatggagtgaggataaatcaacggcctctccttcgggactctgcgactccaattctcgctttttgttgataaatgcggtcctccgagcagtggagtacatgtctgtcaattcaaccagagactcgactgtcggagaatatacgacaacaggggcagaccctgcaaggagcgggaccatcgtcttaaggacgcttgctggctctagcaaggtggagacgatcagaccgtcaaagttaccggctcggccctcgtccaccactgctttaactcgcccccatcggttgcgcttgtggtaatacgcagtgcgcttgctttgtttaagctccgccaattcctctgcaggtatgatgggtggttcgttggcgtagagcggatcggaattggggtcagccaactgcatccaggaaattgatttgaggtgggtgtggagtgggtgggattcgtcagggttgttggtgtcatagccaaagaatttcaagagtgacaagttcggttgtgagtatgggtggataacggtaatggtgttggtagtagcggacattggctggggacgtatgcgccggggctttgggggttcatcggtatgttgagattctgcagcattgtgggctggaggatcttgctcctcggttgggtcttcgtcggcatcgtgaggatatagaattcccatgcgctcagccatcgcggcaacgacaagtccgccagtctcatcgacgatagcataacgtccatgcggcttcatcccctcacccacctcaacgtttccgctgtgatgtacattaccccagcacccgatgagaccgatgtgttcgtcccgtagctccattgccttttgcgcatcccgttcttcgatcagataattagcgagaaggccgacgtccagtgggaggacggtaaaccgcttcagatacttcttgcgtttccgcagcgtgtatttggcaagagagaatgcggtcttctggtctattgcgctgtgcgattccaagagctttgcgacaatgtctttccccgcgccaccggcctctcgcttcaattcttcaatttcctgtagagtcaatttttgggaagagttttcgtcattgatttgacgatttgttcgcatcggtattccattttcgccagtatccacgtcgtccccctccccatctccctctccgtccgcgaggagggtctccgcatgcaactcggttgctgacacgacacgtagttggtggccagcatcatcgcacgcatcgagaatttcaaaggtgaaatagaatgggcgtccaataatctgattggcggtaaagttaccaaatcgacccaaattgacgactctggtccaatgttagttcttgcgatggaatctttccccgcatagtgcagaaagtacttacgtatcggggataatctggatgagtcttaactgatccgactggagccggatagccacaaactggcccgggcgaatataggaatgcatgatggcgatggaacagctgtgcctcgagctcttccacaaaattgttctggggacttttatggccgatagaatgacagccaatcagaggacgagaatactccagccgggtggatagatagtccgggacattcatgcctgaaacgtatgcctgatatttatgccttaattactggcttcataccaatttcgtcattaatttccaacataccggcccataccgtactagcaccgccactccacccgttgcccctcttgcatgtgaataatacggtaaatacgcatactggcgtagcttccccaaagtcaaccagcgatcgctggtggatctgcggaatcccggtgccttgcgagaagagagacctctgagatcatcatccacctccgtcattgccttgttcaacatagctttctcttcatttagggcatggtatttccgagcacacgctaaaggctaggctgttgcccatcactcgcgtatctgcgtagacgggcacttcagcccctgccgtcccagcgcaaggcgtttttcctatactaatggcttattgttattattctgagcttacgtcctgaatcaactctcaaatcgaactacagactctttctgagtgtgttctgagtgtgtgtcgatcgacgttgagtgctttattagccttcccgttcctagaactatacgcgaactcaacccttccctctccgcttcccacaaggtcaacggaggtcttcatgggcctgcgaaaacagcccccaccgcgtctggagaacattagcaagtcaaatgttcgatcggacgcacgctcatccaagtcacccaactctgcttccttccatcgcccgattcgtttaaaccgatttccttctggggaccctatctactctcccgacctcaatacttcacctgcgtttgacctgatgccacttgaggaagcacagcggtcgcctgtggggtctcccaccagccaacccccgagctcatggccagacaataacagaagaccggaagacggccgctccggtcagtataatcagtatgagggagcatacaacgaacctgcaaataccaacggacactgggttcccccgacattgacggcaggtcaacaactaggagcggccgagaatgtgtggcggtcaacgactgatggcggtcgtgcttcgactggagagctaccggtacagctgcagtcgaataacccattcttgaagcctaggccggcagagcatactcaagatctcttggatcgcaatgagtggggacgtgattcacatgcgacttcaaacagtgacgcattgagccaatgtatggcattagttccttctgaaagttccctcagaatgatatttgttgctaacgacttgtagccgaagggtatattccgatgactgcgcggctctctcttttagatgagcccgaacaagaatccccatggaccgaggctcctcgtcctcaatccaattcccagcaacgccctgtattaggcggtcaccacctcgatgataactcaccgtgggactctcaacagtccgccaaggttccggttccccagggtgtctacctacaaggagagcagtctaatccatatgccccagcggttgcggtgcagccgtctggcctttctgattgggaaacctatgccggccaacaatataagcctccatccaattcagggagacttggatcggatgctggaatcaatactccatctgttgctctttctaatcgaacctctgctacctctcatgaactaattgattttggtgaattgagcgccactgggaattcggtgggcgagaccaggtctcctgctgcatctacggcgtactcagaacctgccgcgaacggagcaagatcattatcagaaaagcaagacctcgcagctcccgtgatacaacaactacaacaaccccaagcaagccctatactgtctcccgcagaagctgcacgacaaaaagagcaaagatcagaaacatatactattcgacacatccgatggaccgatcagagtggtcaactgctggagtccccgattttggtccaaaatcaaaacggaccttgtcctctgctagcccttataaatgcattagtgctacgagcgaaccctaacgctcacccaccaatcgttagagctctgtcaactcgcgagcaaatctctctaggtttgctaattgaggcgatgtttgaagagctgacaacatgcctgggccctgatgaggagttcccagacatcgaggccctcactcaattcctgacaatgctgcacacgggtatgaatgtcaatccacgtttgacaatggtgagtacatgcgatgtatctgtcaaatatcacttatactaacctaatgtcagaattctactgaaggatttggcactttcctcgaaaccagcgacctcggactgtatagcacgtttggtataccattgatccatggctggctagcctcatggtccagtcctacccatgctgcgatgtcacgcactgcccagtattacgaggatattcaaatgcttcccttccgcagacacgagtttgaggaacgggtggcgcggggcgaggcacttgaacctgcggaagagaatatcatggcggatatccaaaccatccagcgatttgtggaaattgagaatgcgacacaattgagcccatttggcctgacacagctctcaactaagcttacgcccggttctgtctccattcttttccgcaacgaccatttctcgacattgtataaacacccgcaatcccaccaactctacactttggttaccgatgctggctatgcgggccatgccgaggtggtttgggaatctctagtcgatgtgacaggattcaacacagaatattactcaggcgattttcgacctgtaggcgctggtccttcagctccatctggccctgatcccgcggtcctccaagccactaatgagccagccactcattctccagaggcaaacgaaggatcgaaatcccctgagctgactcaagaacagagtgatgccgactatgcatacgcgctgtcacttcagttccaagaagaagagcgacgcgaaaatgctaggaatgagcaggctcgtgatcgtcgcacatctgcgccgagtaattcttccaatcggccattgccttcgcctcgcttgagcaatgtgcctaatcgaccattgccctcgcctcgtttgagcaatgtacccaatcgatcttcgagcattgccaatacgattggttctcggcctagtcctcagccacaacatggacccgaccctgaggacccaaatgcaccccctcctccatatgaacaagctgctgctagcgggccgcgttgttcgcctcctgacataaggccatatggccgtgccgcaggaaatcagtaccctggtaaccggaatccgcggaatcgaacctcgcagtcttctcaccgaccacgcccgcctgtacgtgcaggggatcataatatagaaacagaacggaacaaagaatgcatagtgatgtgaccaatgtaagatctggaaatgataagaggcgttgatacttgctttacgccaatgcactggatggatgaatatgatgcctacaaatgatatatactattgtagagaaagaacatgtctttgattgattcgattccagatgaaaccttaatttcttgctcctcgttatcctcattctccacggcgttatggaaattaacaaggaccttctccgtgcctctaacaggagcggggctaataagcatatatcaacaaagtgacatgtgagatagctacgtatgttcggacttgtcacggactacacctatgcccggaggttaagtaaattaaaggactcacgtgaggaagaggtttctcattggaggagtcattatccagatagccctagatcttcccccgggaaagactaaaaaagtgtgtataagctatgtattgcgatatatgccgaccatattgccctatagcctaagtcaaaggcgatttgggacgctcttatatcctgaatgatacaaccccggtccaccggcccgttgactaggatcagggcatacgtagtataaagaatgctgctatgataaaattggcctataatcatccttcacggtgctgatttccttgcgagccatcaggatctgtatatttcctctgacagtagctcttgcgatgcagattcttctttctagtgctctagccctcgttgggatggcccaggccactactgtttgcagtggaacatttagcacaatctcagctgccgagtttgtgtctaacctgcatcccggttggaatctgggaaataatcttgatgctgtccccgatgagggatcttggaataatatgccagttgtggcgtcgacagttgatactataaaggatgccggctttaggagtgtccgactgccagttacctgggcatatcatttcaccggaggctcacctaattggactgttgacccagcatggttacagcgagtctctgatgtggttgatatgattgtggctcgtggaatctacgctatcgttgatgtgcatcatggtatgatatatgatcttgtatcggagaagggcctttactgatataaaacagattcatgggtttgggctgatgctacccagtctggaaccaatcttactatgattgaagaaaaattctatagtctctggtatcaaattggaacgaagttggcctgaaaatccaacctagttgcctttgagcctatcaatgagcctccttgcaatactgcggtcgacgttaccgagtcgaacaaactgaacaacatctttctccaggctatcaatgatgctggtgggttcaactcgcaaagaattgttaatctagtcggaggtggtgaggatagcgtcaagactgcagactggtttgtagcaccctctggattttggaatccatatgctattcagttccactactacagtccctgtgggccatagatcagtttatacttcaggtataatgcgttgtgggttgaactggccgagtgggcttctagacgacttgatattcagcgcttggtaagagtatagacccagttttttttttttttttttttttttttttttttttttttttttttttttttttaaaagtttactgatttcaaacaggggaaagatcatttggggctcggggctctgacagtgacaagactactgtgcagtctgacttccagctgctgcgcaacgctttccctgatgtacctctccttttgggtgaatacgatgcttcacccaccaacaccgaacccgctgcccgatataagtaccttgacttcttgatcaagactgcagccagtctcgatatctcctgcgtgttgtggaataacggattggaccacttggatcgaaccgcaggagtctggcgtgactgtaactcactctcgatcatcacaaaatcaaccgagtctactgccaatagtttaccagatagtaccgaggacgcttctgcaaccacacattcataatcagcttatattttccatcagtatggaacagttgtgacagcacaaactcttccatttatcttcaacggtaacaccctctcgtcaatcagtgactccacttgctcggcattgtcgttgggaacagactattctgtttcgggtgcaaatataatattcacagcttcgtacttatccaagcatctttcatctacgacaacaccgggtattattgccactctaacgctgagattctcggggggcgattcgtcccctgctgtccaaattgttcaatggaaagccccaactctgtcgtccacatcggcggtggcttcgactgtctctggctctgccctatcaattccaatcacatggggcggactatcaaccgtcgctgcattaaaggccttgaccaagagtggaacatacctggtcgatgactggacggtatcactgagccctatccagcaagcgagagttgtaagccaagccctatttctctttgtgtaccatttactaatactactaatatatcgatctagacctacagcaaccagtataactgggatgactccaatgtaatcctcacttcatctgctattagctgtcatctctgctggccaatcgaccgtgttcaccttcgagtttttcccacgggataatggtgctgtgaatgccgtcaactttaccttgactgtttgataggatttatacctcgatcatgatagttgtactgaagaaatagttcaattatattataagtattatcaggctttgcttagcagcctaggtatcgaatatcagcatttatgtacaaaaaaaaggtaaaccatcgctgtcatcaagtcattaaattccatggcagatagctaaaatcaatacaagatttttaattcccgtaaaggaagatgagggtcatatttgtcccaaacgatcttgttcttctcattcaggtgtgcgccctcatccgtgatgctgattactggatctgtctccagaacctcatggttactgaaaccccacttatcgcgtgggatccacagagttggtggtggcgatgctacacatggctcgaaatatgctgtacgcatctcttcgggtgtgtaggaaaccccctcaacattgcggcgaatcttttgacgcaatgccgcataatctttgtatacgtttggatggaaccatttccagaaggccatagcgcgtgggcggcgctcttcgttgatcgctgccacttcgtcttctttctcttggagcatttcctcttctgcgtcaagggatcgtggtaagaaactattcagcggggcgagtgcatcgttgagcgacatgtgtgccagtatgttgccgaccatgaatagagccatgattatgactgggccaatagcgcccttaatagcgcagagtccaatcaagcaaatctcagccaggtagagacctgttaacaaatgttgcagggctcgtgggtagactagtcccttggtgtcgacttggatgtcatatacgaagaggaagttgtatcggtaggcttggtatacaagataaagcccgaggaaagcaaatcccagaatcagaggtgcgatgcatgaataggtcaatgctaaaaagtcgagtcagttcatcttcgttaaagaatgagtcctggtatagggtattacttaccaattacagccatgttggtgaagatggggaagacattgccccagctgatgctagcaagttcgacccatccttgaaacagacgacgtggggagtaggcaaagaatgtggtgacaaatttgaacaccaaggcgctgacaatttgaacaagggccagggaactcatgctcaatccttgcagcatgaagtaagaaatgtagaaattggtcgccttgggtaagttctgcgccagcagatccttgaccgagagaggatccttgacaatctgtgcggtagctgccgacgcagccgatgtcaaggtcgtgaccaagaacacttgaaccacttgaaatacaaagtgagcgctttgtgtgaacagctcaactcgtgcccttgatgggactccggctcgtctagcgcatactaggtagaagtcagcaggaattcaagcaacaaagagaatccggagagcgtactacgacaaatgatcggcactagtgacatcaacgccgctagtgatgcggcaggcagaagaccctcaattgctccttttatgaaatcaggcaagtcaagaatgaagctgaggaagggaatgatcctgcagatgtatgtgatgttcgaaattgcaccgacgattgccgcaggaaatgaccaaaagatgaccatcgctgccaggaatccctggactgcgaatctcctcacgattctttgccaccagctcagattcagtgccgaccatacaacctcgcgaggtgagattccaataaagcgaggcgtcatgtgaaatggttggtgatgcgacagggtttgtagcgcgacttgtgcatcggcctggctgttgaattcgacaaagattgcactgagctgttttgcttcaccattttggtgttttgcttgcaggtttgctacttcttcggttttctttgccagctgagcccgataccagtgaatagagtcgaccttttcaccaaagaacttcggtcgatgcatcggacgtttgaccttgtgagaccatgccgggttgcttgactcgcagtccaggcacatgtcaatattcaattcgcctgttttgattgcttgggttcggattttattcgctcgccgaatgagcttggtctctgcggtttccaacttctcggctagtcgatctcgttcactaaccatcttcttcaattttgtgcagtcggaggtgatccaggttcggcggatggagtcaccaaatacttgtcgtagtttattttggttcttgtaagcgtccggaactgacatgaagaggactgtacgggacgacattcgagatgcgtaggcaggcgagttgaggtaggcctggcggaggtttgcataatacagactttctctaaccacgacataaaacacgaaggctatatattcttgtcagtccagctgtgttgcgagtgaagatacggacaactgactgaagtaaacacatgccactatagcattggcatagtatctgctggggttcttgacgttactgaaactcaagatgtcgagctcggtattgccgttacccccagtagcatgcagaggcagcagaatcggccatgtaatcacacaacctgtcagacatgtcgcagccaagacgcgcaaaaatcgcaagaaaagataaccgtctagcgatgagtggtggagcacatgattatcttcaatttttaaaaatgtcccgagccagttaacccagccagaaggcaactcgggactccgttgatgctcgtgtatatctggtaagtaggatctcggagcgtaccagcgacgctgagttcgacgaaagatcagaaataggctgacccaaaatatagcgtatacaagtgcaggcaatagagtcatcatcagggccgagcccgatgagcccccttcgccggtgagactgctggcgatatcaccggaggtggtggacgcgttgcctcgcgacgatccaatatttgtgtcattatcctggatcacattagcacggatttcagtatatggggtttagatgggaggcataccgttatacttgacatggtgagtatcgtctccgagttgagaaacaaagagatgtacaagccaaggaaataatgacaggaaagagggggctatatggagttcgaagtaaattccccgtcaaaaagaagcaaagagaaaaagcaatgctctttgcatggtccccgcttgcgacctgtcatccacagcgatccacaatggatatagacaaatgggtgagattcgtgaaattcgtgcatgtacgagctgataggtcagccctgaagatttgatcccaaagccgaggtgtcgtcgatccgatagtgtgtgggtcttttttgccttggcgaagatgtgaagtatgtgctctatgtatgtgtcagatggaatttcaggaaatatcaaactcgtgagagatctagcatttacatacctttcgtttgtgcagaagaaaaaaaaaaaaacaaaagacggaaaagtaacgagagagaggaacgaaacccagccgatgcgggtcttccaatcaaaaactattcggccgatccccgctgatcgagaaaaaacccctgaatgagatgagaactttgaagatttggagttcatgcaggttgtggaccaatagacctattgatcttatgaagcgtagtatatggaccattctaccctcccaagacttcgcttggagagacttttcggctcccctcttgttcccctcaatgggcttgagcaatgcaaggggcccttctggcggtggaggctggacgcatgggattacagcacatggggaatgttgagtctggatccctgtgaagtgtcaaaagatgcatcatgcagagaaaccggtatactcacgtggggtggttcgagattatcggctacggatctcactggaaatggcttctagatagatggtatggtagacagtcgaaagaggcttcgatatacgtattacttgtatcacttagatcaaggtgatgtacctagaccgtacttcgtatatgtacctcgactgcagactgtagtacaacacagaggagaaacgtgcaggtcttggcatatgcacatagggatcactcaacattctcagtcctttccagtcttcctttttcagagcccttacttgatctaaaatctatagccaaccttgaaaaggttacactacattcggggtccatctaagcctggacacaaaatatatatccaaatatccggatggtcaagcgggaacatatatggagatgcatcatgcgcaagttccgatgggggagatgggtgacgcatgggatgttgccaatgtgacgctttcctggttagtgacgagacgtaatatatcactaggaactcatcgtggacgagggcatgattcgaaatattggaaatagaaccttcccgataaattgcgcagagatgttgaagaatcggaacgattatatgtctatatacaacatcttcaaactaaaacttcagctcttaggttcacgattctccttggagacaggcaggaatttggtgtgtgaacccttcgaaaccaacgggcccacttcatcgtcgacgactcgagatattttgacggtcgtgaaggccattgacttccccacccgatcagcaacggcagaaatatccagagtatctccaacggtagccgttgacaggtatgaaacgtggatatcaatgcttgcgcctgttctctcatatccatgtgtggctatcgccatgcccccggcccaatcgatgatggtcgcagagacagccccgtgaatggtgcccctggaattgacatgttccgctgtgagtttaagtcgagcctgcacctggccgcggatggcactgatgatatcgacatcggatagaagaagacggtagataggactgtcatttttggtccgcttccaaatcccgcgcacatgctctaattcggtgccattcatcgtgggtgagtacggaaatcaagttgggaggatgaggatatggtcaagaacacagggctgacgaatgtgtagactttttgaagtcggaagtcagagtcggaggggccgagagcggaatgggccgcctttgcacggaacataccgaccatgttcttctggaaatagggagagttcttgtcactgaagtctgccctggatacattgataaactatccgagaccaacattggcaccctagtctcggtgctggcttgaaccgagctttatgacgaactggagatcttgcacgcccaaactacacttgaaagtgggaatactgacgagtgcatcgacgaagacaagatattgacaaaagaatcctgaagagatccaggctctaacgcatggcgttgatgtcaagctacgttatatggaggaagtgtggcacctagctgcaaatgtttaggtagtattggagatctcgtggtgccttctccgggatcaagcatcgacttcatctttctgatgattcacattcttcaagtaacgtctgtcataaatcttggcggtgtgtagcctacaacataccgtcgtggagtgtggcatccctgggagaccgacatagggcggtgaatctggtgatgattgcagaaaaaggggagataccaacaacacaaactcgtcgtcatttcgcaaatggagaagtcaacaaggacgttcaattcgtctttagaggccaaacagcccttcccgcctctgttggctgaagaccatatatccccagaagaatcgcaagagagttatgaagacgagagtatcacctcccccggctatgaggagattgaggtggatgacgatgcagatttccagtcgcactactcgttagatcaatcgttctccgatacagactccgatgaatcttccaatattgagcgaaaccacccatttcgccagtcctccggctctctctatggccccaatgcatttgcgcctccattctacaatcgtccacccacccctctaccgccctcaccatccctcacttctcttcttcggccgcccttctcgactactacatcacgcccaactactccggacagttcagatgtcgagactcccaacgataccgaggcggcagtcgccaagtcagctcgtcgcgcaaccaccgttccgcgcgccagccccaaggtccccacctatgaatactatggcttcgtattatacctagcttcgtccttggccttttgtaagtctgacgaaaacttgccggggcagttcctcgtagtctcctgcacactaaccgggtcaacttagtgttttatctcctatggtcttatctcccatcaccgttcctccaccagctaggcatctactattatcccaaccgttggtggtcgctggcgatccctgcatggttggtgatgttacttatctacatttatgctgcgcttgccacgtataatacaggctaccttactttgcccatgcacagcatcgagaacattgttgatgaggtcgcgaatgtatcggtgattgacggaaaggcacggagacgtcccggtggtgctaccaagatgaagcctggtgctacctcctatcagatcatgggcccccaaaatcgcaaggtcaattggcgagaaatttggagtgagggaactgacgccgtcatggacgtgccggtagggggcgtgtgtgaggttttgtatggccaggatcgagaagaagactttgactatccggctgcagactcatagcttctcggttcaatcaattcccttgccaattcaggctgataactgcaaaatactccgtattgatttcagtgttcctgtctacttcgatccacctgggaaatgacgtcgagttagaaatcaaatagcacgtgactagcagtgtctggcccccttccgccctccgcctaactgcccatatctccaaagccgactgttgagagaataatttcacaatgtcagcagaacggccctcaacaccaccttcgcagcccaagggctgggaagcaggacagcttccccgcgctcctatcactccagaacaacaacggaggatggtaggttccctccaagcttgcgccatggtcagcccgaactaatcagtcttactgataggaaatcagtcgcatgaaagctaaagcccttcgggagaaacgtgaagccgaactatctcaagccggtccaaatgactccaagtcggtgacaggcatcaagcgctcgttcacctcgatggcggcatccagccaacctgctaatatgcgcgatgcatcttcttcgaatcgcccactagactcgattaagccagcccgaaatttcacaagctacgtcgactatgattttagcaagatgaccgacacaaagggtgggtttttgacacaggaggatgacccgttcaataaacaactgcacgttcccgatgggaaagaacaaaagccagcacatatgacgcagaaagaatgggaacgcgatcagatactccagtcactgaagcgaaatcgggagggaccctttgaaccaggtctcagtgtcctagatgataaaagcaagcagaagacatgtcgtgaatgtggcagtatcgaaattgattggaaatgggaagaggaacttaaatgctgcatctgccatacttgcaaggagaagcacccagagaaatacagtttgttgaccaagacggaagccaaagaagattatctcttgacagatcgtgagtgcctaatcacctatgaaaagagagatgtgctaatcagcccgcgcacagctgaactccgagacgaagagcttcttccacgcctcgagcgtccgaatccacacaaatctacatggaacagcatgatgttgtatctacgataccaggtcgaagaatatgcgttttccgacaagaaatggggctcaacggaggcgctggatgccgagtttgaacggcgagaaaatgataagaaacggcgacgggaggctaaattcaaaacgaagctgcaggagctgaagaaacgcacacgtgtggaggcctaccggcgcaatcgacaaggtgcttcaggcggagagtttggcgatgatctcggttctggacggaagcatgttcatcaatggggccgatccatcgagaatccagaaactggaattggggtcaagacgtgtgtagaatgtgggatggaggtggaagagctcgagttttagacgaccaaaataccatagcatgattgattattgtatgagaccacgatttaatttagcgcttgaacctatttgtgacttccattattcttgtgctgttgaagtataaaatgtcacatatacaccacagcagtcaaaatatatagttcccgaattagcaatcaaactcgacaccagcgatcctatcctaggtcaatctttcatacccatcaaacaatagcaacattcgaatctgcggtgcatctatgctgtggagtatatacttgcgccttgtataactagttaactaactagttaactaatgggtcatatagttggcgcctggaaatcaaggcatcaaccatcctctcaacctcgctagtcggcctgtcatgatccctgcggaacttgtcgaattggcgatcaaataagaaactacttttatattcacctttaatacaaagaccctcccaattcatccaattgcttactccagggctggaggtaacgtgcaggtcaaccttctccatctagaaggcggtcagcaccccccgaggccatcttcaccataacaaaagatcagtgaaggcacattctcatcctcataactttcctatcattgctcaaccttgctcctctcctttggatattcctcctcaggacgcctcatccacaggctgactcggcgtggaacgtggttccttgccgtcgccatcaagggacttggttcgcttattgcggatacgatttactggggtcaggagaaatcgaagctcgcacctcacacgtcacttgatttactatcggcctgattttcccatcggtacctcctgcagtgctttgacccttccgagactcgacccgtcctgtgtttgttcatgtcctggcaatctccatcagctatggctgggattggaggaatgcccggcgccatggatggttcgaatggcccacaagggacggaatacacattacagggtgagcatgaaccgactcgatttcttgaatgccattgactaatattcatctctaggtgtaatgcgcttcctacagacagaatggcaccgacacgagcgtgaccgcaatgcgtgggagattgaacgggcggagatgaagtctcgcattggtcgattggaaggtgatctgcgcacaagcaagcgcttgcatgaggcccttgggaagcatgttcgtatgatggagaccgccctgaagagggagagggagaaggtcaagaagctttcgaataacgaaaagtatgaagacgctaaggatcccaaagatgctgcacgtgaaagtgtcaacttcctgaaaggtatgtgcctcgcaattgtatgctagcacgctcggtgagatttactaactgagttattcaccagcgcatcgccccaagccgagcacggaccccaataatgacgaagagcgcgacagcgaaaatcagcatgagtgtcaaatcgaggacatagacaaagtccggggatatctgtccaaagcttcccacgaaatcgcgtaccatgttatacccgcctctcacccgccacctgacctgaacgactccgatatgtcaggccagctctatggcaattcccaactgtcgcaacagaacctggaagaggcttatcttcagcagcaacgtcagaaggcaaatcacgttatggcacgtgaaatggccttacagaaccaccaaccaatgtctaatcactactccgacaatgccatggctcgtgctcaaaaccagtatcttcctcgagatgccatggatcgacggtcaatggacccgcagcaagcccccggcacagcaattgaaagtcgaacccaagtatacgaacagggtatagtacacgatcgcccaaaccaggcacacgagacccagggccctcgagtgatcgtcaaggaggatgtgaatttggaaaacttgaccgaggaaagaacagaggatgtggatgggtggaattttgacgaaccggcggagcaagaactcgtggccaccgaaaccgtcccgcctcatcgcccggataccgatgctttcccaaatgccaactttacgtactctgagtcgaccaaggacgggtctttccctcaccggacgaagagcacggaatcaagtcgtaagagcgatggtgcaattgatgcccgggaagcgggtacgacgttcaaacaaaagcaagattccaacttcgaagtccggtttgtgctgcgcggccacttagatgtgattcgatctgtcatcttcactggtggtggtagctcggacgagcccgaaatctgcacttgcagcgacgatggaacgatcaaacgatggatcatcccaggtacttctggtggctctggagccggttctagccatagctcggacattacgagtgactttactcaccgaggacatgaaggcgctgtgacttctcttgccgcctgctcaccgtcccagaacaccttcaatggtggctctgtgttgggtgatgggttggtgttttcaggtggccaagatgccagtgtgcgtttatgggagcgtgggcggattgatcccaaggccaccttccacgagcacaaagatgcagtctggggactctgtgtccttcccgggaccatgggctctgtttttggcgactcaagtagccaatatggtggatcggatcgcatccttctagcctccggcgcagcagatggctacgtcttgatttgggctatcggcgcctcaccctcggctgcaaaccgccgtcaaggcagaagggagcggtcgaactcaaattcaatgccctccggttccaacttcccaactttgcctcagcccagtgttgctgcacccccagctttccattacactattgttcatcgcatcacccgccctaattctccttcccccacatgcattagccccttgtctcttgcaggcgtcaattttgtcgtctcttactcgaatgcctctatcattgtctacgacacgcggaccggcgaagaaattgcgggtatggccagtctcgagacatacgatggcacgccagctactggggtgaactcagtcgtcgccacgactgtcggctttgatggaacagttaatctcgatcccaaccgcgcgatggccgaagaagaagaagttgtacacggagctactggatcaagcagcgtagagggtgtaatcatcagtggttacgaggaccgatacatccgcttctttgatgccaatagtggtaagtggcatccaaagtgccttgatatttcccgcaatacgctaatattcgatacaggtcaatgtacatacacaatgcttgctcaccctgctgcgatagcctcactgtcattatctccggatggacgtgagctcgtttcggctggtcacgatgcaagcttgcgattctggaacctcgagaagcgaagctgtactcaagagttgacaggctaccggctgatgcgtggcgaaggagtctgttctgtagtatggagccgtgatggccgctgggtcgttggcggtggtggagacggcttggtcaaggtctgctctcgatgattgaaacgacggaatgaaaacccgtgtatgattcttcttgcgttatacctgtgtgtgtatctcttcgcgtttgctcgtcgttttctgtatgatcccatgaactggatgagcgattggccggtccagttatttcgagcatttgcaacggtgtttactgacgttgtgtggcctcccatactctcctacttgattttgctttttttttctcctttcttttttcaacatgtgtactttttacttcgctgataacatgttcgacaaagattccctggcgtgcgtggatgttttcttcccttcaactgttttggtacatgctctattctctatgggagctagatcccatcttgttcggatactgttccatttgctcttgtgatagggtcttgattgggtttgaaggagtgcctgataggccttgaaattatcccaatacttgacgtgtcggttgtttggtgtggatggctttttttccccagttctgcttgaacgtgcctatgtagtttgtgcctcggaaaccgatagctcatgttgtgtgtataacatttgaatccataccattcatcgagcaaactcagccttgttactctgtagactatcattgacacaagacatgtgaaacgacgggaacaaatacaggtattatacgatattgacattatttcgctgcgctgccatgaagatataatctatttggatgagctccacgcctccttgaacaccaatctcaaccgttttgcttcttcctcgtccttcaatcgctgctcgagatagccttgcaggtcatcccagaaagcctctgtatgcaacacctcctcaccactcggacctatagcagccttgggcggtgattcatcccgcttctctgtaatctctggttgagccatagcagattcaaccacctgcgcgccaccgatgatcatcaccccgatctcaacctctttgcctcccgccataatcgcaggttcatctgccaatacctcggccaatgtcttcccggtaccggtcactggcttacgcttgtataagattttgatcttgtctagcggaacttggcctccctgagcatcggtgacgcgcacctgcacagcatcccggatatcctggaccgaggtggtcgagagaggggcgttggagatcaggaattccagagcagggttgcgggcagacttgacgcggacagtgattgatttggatgagcctggtgcctgtactgacctcacctttttgggcattggaggatgcgcggctgaaaggcgggggagagtgtactatcgttttcacagagcatattagaatgatcttcctcaatgagtaaagctagagaatgttcgcatcaagactcacgggcactcgtagtccaatttgctctggatcgaagacataatcagcgcgaagcctgataggtcgcgagtctagcgtggacagaaatgatttggtaaaggtcagctccgacatggtgagaaatttggtagaaattctcaaggcagaaaaagagagagagagaaagcaaatccgagctgatagctgttggagtacggagtagtggaggtctggacctgggggtttcacttgatgccggtgggacaatagacacctggattataaggcatagttgtaaataagcacaccgcctttcattgcttctgtactgctggcagtcaccgcccgaagaaaaaaaaaaaaagacggaaagaaattacaagctccccagaaagcaaacactattaacgtccccatacacacccctttttcacaatgggtgtcggtcgccgtatgaagaagcagggccctccgggcccgctcgacgagtcaaaagtcacaatgctcaaaaaacgcaaggctagttcggctgaagcgcctccgaagcctgtaccagcgaagcgtcgcagatctaatgccgatgagactgtctcgaagaaggaagcctcgaagaagaaaaaggtcaatggtgctgctcccaaggttgattcaaaggaacagaagaagcagccgtcggtcacgaagaaggctgtgccggtgcctatgtctgatgatgatgatgatgatgatgaggatatggatgatgatgagttcggtgatctcgatgagatcagtgacggctcaattgatagcgacgatcaggctgaaggactgtccgatctagaggatgataactcagttgtcgactctgacgaggaaggccacacccgtggtgccatgttctccgacgacgaggactccgatgctgaagagagattgaccgctgcaaacatcgagggtctgtcgcggaagttggatgctgaacaacaagaggaggaggaagctgctgagcaggaaatgcaggaagccgccctgcagactaacatcgctgcacccgatgtgttcgccgaccaaacccagcagggacttgcccccgacctgcagctgcttcgccagcgcatcacagacacgatccgaattctgggtgatctgaagaccctcggcttgcccggtaggtcgcgtaccgattatatagatctcctactcgacgatatctgcacatactacggctacactcgattcctggcagagaagctgttcaacctgttcactcccagggaggcctttgccttctttgaggctaacgagactcctcgccctgtggttatccgtaccaacactctgcgcaccaatcgccgatccctcgcccaggccctcatcaatcgtggtgttgtcctcgagcccgttggcaaatggtccaaggttggcttgcaggttttcgagtctccggtccccctgggtgctacccccgagtacctggccggtcactatattctccaggctgcctcttctttccttcccgtcatggctctcgccccccagcctaatgagcgtgtcctcgatatggcctctgcccccggtggtaagacaacctacatgtccgccctgatgcgcaacactggctgcattgtcgcaaatgatgccagcaagccccgtgctaagggtttgattggtaacattcaccgtcttggctgcaagaacaccattgtgacgaacatggatgcccgcactgctttccccaaggccatgggtggcttcgatcgtgttttgctcgatgctccctgcacaggtaccggcgttatctcaaaggatcctagtgtcaagacgtccaagaacgagcgtgatttcctcgccattccccacatgcagcgccagcttcttttggctgcaattgattccgtcgaccacgcttccaagaccggtggatacattgtctactctacttgcagtgtgacggtcgaagagaacgaggccgttgtgcagtacgttcttcgcaagcgtcctaatgtcaagatcgtggacaccggtctcggtggcttcggtagccctggattcctgagttacatgggcaagactttcgatcctaagatggcgctcacccgtcgttacttccctcaccgcgagaatgttgacggtttctatgtctgcaagctcaagaagactgccgtgactcccgtggccaagtcggacgacaccgaaccccgttctaagggccccaagaagacccgtagtacttcctcgaatgcctccacggacgacgagtccattgaccggaccccgatcgttgatgagaacggacacgccgctgatttcgagggtggtgccttcagctccttcgaggatcccgaggacgtcgagcgcattgctcgcgctgagcgcaaccgtctgcgtcgcaagggtctcaatcctaagggtgttctgaacaagcccaagaggagcaagccagaggtgtcggagaagacaaccgaaacggtggcacccatccaggaagaagagaccaaggccattgtctcgaagaagaccaccaatgagccgaagggtgagaagaagaccgtggttaaagaagataagaaacccgtcaccaaggctaaggaagagaagaagaccgcagccaagggcaaggtcgagaagaaggataagaagtcgggcaagaaggccagcaaatgatcaatgacttgatcattcgtctctttgtgtataatcttcgtttttcgttcttcaggcaagtcaaaagcatcatgtattaggtccgggatccggcgcattggatataccttttgttcaatcaagatcaaagtgtttcaaaaaaatcaaaaaaatcaggacaaagagtacaaagaaatttaatgtaagattgtgctaaatcaaagatattcaatttatcccaagtcctaggtttaataactgttcttgtctatataaccaaaatgagagtataaaatcaatcgcatcactccccggccaaattaccgttcgctaaaatcaatgaatcgaagtactcgacaatataaaaatagcccgtaccacttctatgcccgataaatcttgatcaccttcttgacctctttgcggcacatcggacataggctcacgaggttcgcacaagccacacaggaacaaaggtgtccacactcggcgaaaactgcatccatttcctcggtgtaacagatttggcacaaatccaactcttcgtcggccacttcccagtagctgatgcccttgccgtggcgtttgccatccttgaagccgccgacatacttgttgcctgtcgtcttctcaacgtaagtaccttgcccatggcatacatcttcgacccaatcaccatcgtacgaatcgccggtggggtaagttagcttgccttggccgtggcgtcggccgaaaacgaagtcgccttcatatatcatgcctgtgttggagatgtgcttgcctctaccgtggtgacaacctttgaggaaatgaccactatagtagtcatttgcgaaggtggcttcgatagtcttagtgccggtgaaaccttggattggatgaccgcgagaataggcccacaggtactgaacaagacggtcaggactggtgaacaatcccgatgaagccagttgagtacgcctttgtttgtgttaggaccaaaagctaatcagatatatgtgtacttacttctccttatttaatttatcccttacgatgaaacataccccgtgcggagctactacatcatcgaagctgtcggcaggtgacaccgtggtgacggcagcaccatcgaatcgtttccaaacgaggaagtcttggcggatagggcgttgtaagtggcgtcggatggatgctttgacgttggcatcaagcctggagaagaatgaccccacggtacgaagcacttgattgtcggcgtcgaatatttgaatgaagtagtatgtatggcccacgggtaacttgacctcagatcgggtctgcgttagacctgccacttctggtgcagaagactgaacttcgggaggtgaaatagtagcggggcttgtggcatctgttaacggagttactgtaacagcagccgtggcttgttgatcacgggcagcgacagtagctaggaccacttcttgatctgctctttcagtagtaaaagagtcgttctctagagacagtgtggctaatggaggcagtgatccatcatcgatgatggagttcacggcacctgacgcagcagaacccccatggggagtattcccagatgagctagccacggcatctccttcggccacaggcgacacattctcagaagcttcgtgtatccagttctcgatgactcggtcattcggcttatcccccgaagagataactgcaggggggtctgggatggcgaagaattgagcgtcctctgttggaaattagccgggtgatggttaggaataaaggtgcatgcaataacgtaccctccgagatgatttccatccaaaatcgtatggtgctcaatgaaggatctagaggagcattcaaatccgtagtgcgatcaaattctagcgagaatccagattgagcaaaggagttaccaatctgccagaaacgaacccgctcgggaccaatgggttcagagcctgaggacttccatatagcaattctttttcgtagttctaccaagcgtgatgagcgtggcaaagtcatgtacatgacactgtttgccgctttggcctgtgccatgagatcgtaggaatcaaacaagctggtcaactggtcatattgaggaagcgcataaacctcaacttgaacatcatccgcagacttgtcaccagtgtggtacactcccgtttcatagtattgtttcaaggtctcagaaacttcccaaggcccttggggaccaggcaaaagttccgataccatatcactgcgaacgtacattgcgatgacaggtacgtcagggcccttcttgtaaatcacagcctgggaaggatcaagaccaagatgtggacccatggctgttttctgagtcaggcactccacgcggttgtcactgccatcgtcaaaagccagccatgtggtacccggaccggctgggcgaaggatgctgaagaacttgcctgaggtccggcggccacgatgaacaacatagccataaatgacatacttgctacactggccatcaatcacccacggagccaggtccagctcctcgtctaactccactttgtcataccgcagctgccaacgtttggtcttgtctagactatggcggccaaactcaacatgaagaaatgatggaagcgaccaacgaccgggcttagcactcaagtatcccctaacggcttcggacgtagacttggcttgatcaattggcatgtaaagacgcgagttgaaaccagtcggcagcatgtttacggtgacttcgccatcagaagacggagcatgtacaaccggactgtcgaagatatgagcgaattgtttgctggcctccgttcccttcagctctagctccaagttgcgacgcaggcgctcccaaaattcggacacatcgctcgaaaattcgtgcagattgcgcaaagtgctagtcacgccgtccgtatcgacatagctccgagggtgtgtctggcggcgaagctgccacatcaacctttgaagggcctcacatagaggcttcggcctagcatcagcattggtaagatgttcaagtacgtcaatattttgaatgatcttgcaaaatggagcaatgtgcaaccacgaggcaagcccggctacctctgggctatgattgatgattgagtcacccagaggtcggtaaccggtcaaggccatgctgtcccaagttggctcggaatcacttggatgccaccagagggacttggtggggtcgtttattacacgaatatacgcgtcaaatgagagagtatcgtcattcagaagggcacgatgttgacctcgccggcgtgaatgaatttggtcccatgggccgtggaaatatgtccacccccaatccaggttatgagtgttgaattgatgacaagaagactgcatccacccggtccgtggctcttgtgggttgtatacaatgacaccgacctgtgcggggacacgccaagggtccgaggttccatgatcagatgggggagtgttcctggccgcaggatattgagacttgtagtcttccaaccacgctgccgcatcgtccgtggctgaagtctttaattgaatctcgggtgtactatcatccagtgaggaatcggctgctcctcgacggaccgtaaattccatcccaggaagcttgccctctggggcgggcatggtggtagagcattcgagatatacactcaatgcattgacattgttcccccgaggatagaacttgattcgccaccaataacccccaataaatgctggtggagagcgaattactttgtcacgattggggtcttccggggtgcctcgaacacccttgaaggtccacgtgagacgggccttttcggtgggaatgtattctggatctcccaaatcacgaaaaaagttggtttcccaatatttgtctgtcaaggggttagcaaatactggatgcttcgtgatcttgcttctaaggttgacacctacgatcactggcactgtaatccgaaccaccgccttcgatctctttcatctcgtcatcgtctgggaccgttgtgtcctcctcatactctgcccaatatgcatgctccagctcttgcgagggcaggattggcgcgggctgaggagctgaacgtgatgacccgggggatcggtttgagtctgtattcggtgttctcaccactctgggtaaggggtccatggccttcaatgagggaatacccaatagttccaatagcttccgacgtgtttcaatgaatatatgagcgcatgtatactcctgtataacgattgataagggcttatcggataagaagaaggttgcggagatgtccacgggtggatagaagggggtccggtagatagggagaggaacgagcgaaaacgaatgaacaagttctagaatagggggggaagaagaagagaaagaaaaaaaaaagtggaaggaagaaaaggaaaaagaaagaagataagaaaaagaaacgaaaaaaaaaaaaaaaagagtccgggggaagttgccgagtggagtctttttgtataagactggattgcctaggctcacggatgaagatttatatgtagatagggtgcatagatatacacctaccgagtagatatagtctaacttcaaccttagacaacttgtctattatacagcgtacctaagtctagcggtgtgccaatccgatccccactcaggggagaatatccttatatgccgagttttggaagattcggtggcgacttggcttatcaaatttccctttcgccactgggccttgcaatccctgggttatctgagccacgccacctcggaaaactattcacttttcaggcacatcaggcatatcagtcatgttgggccgatcaacgtacctgtacttgtacaatgagcgggggccaaccgtaccaattgaaacgatcgcgcgatcaaaagaccctcgattgacaccaaacggaccacttttcgacggtgagtgactattgattggctcttggaaaaagaaccatttctagaccgcgggttcccgcattgcttggcaataagtcttgtcgtactgagactcgacgaggggtaaaagtgaaatcaattttgtgtcgattcagcacgggcaaatgaagcagctacaatcatagggaatactgccgtggcctcagcatagacctacagatgatatggaagtcagcttggcaccaaaagagatagaacaaagagatcaacccaccttgacagacctagcatccgtcttgatcttgccccagctcaccgcttcatccggccgcgcacctgcatcgctgccatcgaactcctgcgcggtatttacatacactgcgtgctcggccccgttgcgcatcaggcatgcattggcgatgtggtgcttgaccaacccaccgcccaagatgatcatgccggcgcgtgtcgctcgaacagccatggtgttgatacggcgcacatcgtctacaatatccacccggagtcgttgtggggaagacttgaaggtgtgaaagtaaagcatatcacccagagatccatccgtcagggccggacagaacacgggaattccattccgggccgcccagtatagaaccgaatcctcgtggtcgatctcacgacccagtcgttcggtaatgcggcttggcgtccagtgaagctcgtcttcctcgtctccagtctcccgagccttgatctttgcagcctcctgttcctccaacatcttgtccaaaataggtaccacccagtcctcgaaagcacagtagttattgttgggtacgaggaggttgccaatgcggttgaggcccttggcacgaaggccagcaccgggagtcgagaacgatccaagatatgtgggggccaagcatttgatcaaatcctcctccacaccccccgcagtggtcacaatggcagagacatggttatgtttcactaaataacgtagggtgtctcgaagaccggaggaaatcaagttcgatgtatagccgaggaagatggtggttttatttcccgtttcgggatcacggaaggcgcgctgagaaacggactatcagactctaatgatttaaaagattcaaagattgcaattaagttcataccatttcattgatgatttgagccgcctcggccaccgcactgccctggaaaccggtatgggccaggctgtccaccatttctgcgacagtgatatcccttccttggaacttatcaaaatctaccccgctcactatgtgagatccctctgggaccggttgcgagctcttgaggacggagtcggtcaccgaagagggaactattgaaggctgctgggcgctcatatttgcgatcggattggaagggacgggaaagaaaataagagaggaattggcgtgaaaggcgttaaatccgcttaaatggggttatcaagatgaggagtcacaacaaaaaaggaagatcagttcggagtagaaggagaggggcaggtgatctttttttttcggcggggaacttgcatcagtctaggcctggatgcctggatgccttggggccttgatgcctcaggcatgtatccataattagtaccattctagaattggagacttcaaccctggagataggttagaatgaataaagaatctcctataatattggcttcatactcttccaagtgtctcatgtctacaaatcttatctctttcgacactatactgctacattcatacatgtatgttgtgctcttagacgcaacattcaatgcaaatagagtttaggaggcacatccccaccacactagcatctaaccgggttagtgccgagccccttgaagtctcacgaactcatattctaaacatattccaaacatattcttcctcgacctgccttcctttaatcctcccacatactccacagagtatacattactctttgattgcataacatccggcgcaaggagctcgcatgatttcgccgatcttgtaacgtgctagtgtttcctgtttcaacgttaaattccttcgctcgacgaatctgtcaatctgtcaagttggacgcttcatttgctcaattctcaagactccaatctagcaatcgtgaaaggaaaaggaacagtacgtgacattggatctttccctcccaacttgaaaaaagacaacgccttacccgatcgggtatccgtgcgcttcaattcttcatatggtccgtgcattcatcgtcacgtgcagaccctcccgagtgtccgttctccatctttgggtatgtgatgcattctgcattcctaccgccttgggctgatttgcactgtacattgaacgcgctggagcgctaaccagtctatagcttcatgatagcatgacgcgataatgtcctcccgatttcccccatcgtccgggttcaatccccgtgaccgttctccgcagcgatttggagaccgtcgcccgccggctggtcctcgtggtcctgacgacgggcctgcaccatttggtagagatccaccccgtggtcctcgggctcttgttgattcccctcgtggtggccattttggtggtcgtggtaggggttatggccgtggtgactttcgtgaccgtgaccgtgacccacgagaccgcgaccgagatcgcgattttcgagataaccgcgatggcccgccgtttcgccgagacatggaccgggactgggttcgccgtgaccgcgatttcgatccccgggacaatcggattggctttggccgaggccgctcaagatcaccgacgcgcgactttcgagacataagggaacccccgggccgcgattttgatctggttcggatacgacgcaactccagggacagcatcatatctgcatcttcgggaggcccagaaggtccccctcctaatattggccatatgcaccggggaggcatgcgagggcgtggtcgcggcgattgggaaggaggccgaggtcgtggtcgtccacccttccttgatgatcgtgatcttttccgtcgccgtagtcgatcccgtgaaccatggcgtggacgtgatcggatggtggatcgcgatagagatcgagatatggaccgggatcgtgcattagaccgtgatcgggtaatggaccgagatcgggaccgagaccttccacgcccgagagagcgagatcgagaattagatcgcgatttggaccgtcgagatcgctttgaccgtcgcgaagattgggacaaccgacgacctgatcgcgaggaccgtgatcgcccagtggacttttggaaacgggaccgtcccccaagccgtgcagatagtcgcgcagccagcggctcaactacatcctcacatgctcctacagcacccggccctggacctggaccaaccctagcagatcgtctgcccgagcatccacaagtggatcatagccggaaatcttcgaccattctcagcactacggctctggaaactacgcgagattctgagggaaatgaccctatcgctgttcgcactagtggtactcgactagatgctgttcgccctgaggctgttcgccctgaggctgttcgccctgaggctgttcgccctgatgttgttcgctctgatgttgttcgccctcacgcttctcggctggatgctgttcgacctgatgctgttcgccctcatcctcggccggctgctcctcgatcggatgctgttcgctctgacggtatgaaaaaccctggaccaatcattcggaattcaccacccccagccgccccccaggtgccggcctttggctcagtgacttccccaatcacgaatgcttcctcaaataaagttttttcagaccaacgcacggcacccaattctactttgcccacagagagagaccgctatgaagtaccgcaaagacaaccggcccaaccccctacagggcccaaggcagaaaggatcgagagcatacagcctcttgaacctcgcagccgccctgaaagaccccgtgagactggcaagcaccaagttgtgccccctcgcctctctaaaccgtctatcaatttccctgatgtatcaccacccaccgctccagctgccatgactcggccagatccgggggcagggcctaacgaaggatttggggccggaaggtcgaactcacttacctcttcccccactttttcacgaattccaccgcctgccccacgcgcattatcccgtgaaccctctatgtcccctcaaatgcaatcgtctggcattccaaccggccctcgagcattgcaatggaaggctccctccccgcgtggccgtaaaggcagcaaacagtgggtgcgaccgggctacggccgaataccctctatttctaatgcactgccgaagcaagagcctgttgaagagagcgaaggtgtttcccctgccaatgaagccacacggcctctattagcacctgagatagacgaccccgagagtggcgagattcttccccatgaacctgcgagagaaccctcgcctgtttccccgccattgaacctcccaccccggcgtagtttatcggctgttgacattcaaacaagtgatgcaaatgaaccttctgagatgagcggcactgataaacccgccttgatcccagactttgaaggttcaagtgatgaggaagatggggagaacattgttttcacccaagaatatcttgatgacaggaagcggatatttgaaaaagatatggagtcactgcgagcagaattgcctccatcacctttggaagattcggccattgtggctcttttgctaaaaatccagctacttggcatggtagccaacgaaaagacagttgaaaacccccccgaaccactcgccgaaccacccaccgaacgagtattagaacaaccagtggatcctgtgccttcagtagaggatgaagagccagtcgaccattcaaccactgagcgagtggtctcttttccctccacactacccgagcgcgaaccagagccaattactgaaactatcatcccccccatggtgccacctgatgaggttactatcgagagtctcccattcttgcactcaggccctccaatacctatttcagatatggatgtataccatgagaacattacgatccaaaatcgtctcagagacacgttcagcacagaactttcgaaggtgcaagcgagaactttcagaaaaaatgcactcctcagggacgagtatgtgtctcactacaagctctggcgaatggctatttgggagctcgatcgtatgaaggagaagaagtccgtgactcctggtccagccttctcaccaatatccacggttccaactaccccggcgcccatgccggaaggccgtgaaggccgtcgttacaaaggaaatagcgagcttgatttcctcaatgctttgaaggcctccgaaatctccgcccaagaagagcttgaacgtcgacgaatcaagatggccactgctcggcccgatctgggccgtgaagcgatcattccgaatatgctcgaaccgcgggaggtaaaggcccgtatctacaaagatgtgaacaacaacattgagtgtaatatggctctggatgttttcggtttcgtgccgcctcctaatgatttcaccccggaggagcatataatctttacggacgccttcatggctcatccaaaacagtggggcaagattgccgaatctttgcccggtcgaaatttccagcagtgtattgtacactattatctcaccaaggaagagattaagtacaaggccaagctcagcaaacgctggaataagcggagcaaggggactcgaaagggtccacgaccgaagtcaaatgccctcaccgcagacatgggtgtggtgaaacctgaccatgtgggtgaggaggagccgcccgctgtcacagacaccggtcgtccacgacgtgcggccgcgcccacctttggcgattccaccgaggtagagagcacgccgattggccgtcggggccagcttggcaaggacggcgaaccagtggatagaccttcgactcggcgtggcggacggggcggaggtactcgcggtgcacggcgcgtgaagagcactactcaaccagatccgaagacccatgtggtaatgccacagggcaatctgcccccgattgtaccgccaacaccacttcatcctggaagcgaaatggatttggcctcggatcacatattggaaggatatgaggcccgcgaacaagagcgttccgaaaaagaatccataccgccaatttctcgaggcagggtgggacgtgggcgagcgaaggaaggagtttatgtcttcgagtctactgaggttgaaccttttctgggaactaaacagcttgagacgggatatggatccttgcaaccaacgagttactggtctgtaccggagcagcgcgatttcccagcgttgctgggacattttggtcgtgatttcgagggtatctcgggttggatgaagaccaagacaacggtgatggtatgtattgggtactgagtcccaatttttgtttttcttctttcccctaatgtcttatgtttgtggctaatgtgcaggacgcaggtgaaaaatttttatcaacgccgcctggactcgggccagaaagactttgagttgattctaacggacgccgaggagaagaaggctcgcggtgaggccacagggccgcttcctgtcccaagtgttgcgccaaagcgacgatacgaggcaactccgtcttctattatccctcgtccacttgcccctcatggggaccctatggccgaggtcgatgaaatacgattccctaaaggcaagcctgttggtctctcaccgcaacccatgtcgctgcatggacgacctctgtccgacaaggaccggaatgtcggtcgctaccagccactggcacaagcttccgctgcttcacctgtgccgtctaccgcaactctaatcgaagagtcgactcgggcaattcgcgcgcaaggaggtccatctcaccgcgttcagggcccacgccttggatatttcacagaggatagacgagactcttcgggattgccccatggcgcgtctcgtgcgcaagaactagcgatttcctcgcgccatcctgactccatgccgacggatatggcaagaatggaacccttgtccacacagggctatattcccgcgcagcagccaacttctcacctttcatcaacccactcacgtcacgccagcttaacacaaacccccggctcgccatccctgcaacttagacccgaactcgacatctcgtctgttcaccgcgatccttttgcccaaagaccttactactcgcttgcaggtcagcccatgggtctaccacagtcgcctcgtcctgggttgtcgccagtgaaggacgtccctcgcccgagtgcgactcccgctcccgacgcaactcgtcaggtgcctgcaaagcggtctaacatcatgagcattctcaacgatgagcccgaagagccccaaccgcgcaaacgatttgccagtgagcaggctccatctgtccctggcgcaacctcaggcataaacccaaggcccatataccaggctagcggaccccctcgccatgaagacaatattatgtcaggcatgtcgcaaaagccttctgtttacgcccagcaaagccaatatcagccgtcatctcgcggctactcagagtactctggctatggtccccctcatggtggctcgggcacatcaaataatgactggatggcacggtttgatccacgggcgcaacagactccgccacagcctcaagctccatcactgccaccacaacagcagcaaagcggccgtcagggttcgtattcatcttacgcggcaaatccaggccaatcctccttgacgaatctttccgcgccatccccagcgccgactccgccgccaataaatgcctctcaacgatcggcttatcccaacgttttctcccaaggctcctctgctcaaccacccatggcctctggctcccgagatatggcctcgcaaccgggttcctatcgacaagggtcacctggcccgcgtcccggtatggtgtatggctcccgacaagatccaccaacgccagcgcagtcttcggctagcctgtatggtatgcatccgcggcagtcagcaacgccaaatccagtacagccacacagttatcaacaacatgtgcaaacaatggtcagtggatcgcatcagccgcaatcccaccgctcaacacctgtcaacttaccaggtgcttcttcgcagtacgggcacaacacccctcctcctcagtcccaggctggccggtcaatggcatcgctggcgagcctcggtcgctcatacacccctccatcggctctacattcctcgatgagcgggggcactatgggcggctatgccccccctcagtcatctgcgcctggatcgataccgccactccaccaacgacctccgggatcgcttggtgaccctgtatccacccaaacacatcaccgtgtctacagccatgggtcggctcaaggcgtactaccgccgccttctcaacctcctcgctagggtcctttgttcgattgatttgaatgaacttcatgtggaaggcaagaccgtgacgggttcggttgtaaattaatttgttgtgtttgtgtttctttctcttgtttagcgtcctggcatctttgccagcgaggatattcatttgattatggtttatatgtataactagatgaatgattttatgtgtcaaaccttgatgtaatgaatttttacaaccttgtaggactaactcaatatctacattagagtgaaaagtatgccctcatcaagacatgttaccggtccatctggttcatatggctgggcaggttccattcatcatagtccaaatgcacaaaggcacggtcgacagtaggcacactctcgatgatatactgcaaactctcaccaacgtcatgactatcccgcaagctgatcttttcatccacaacaaggtcaacttcaacgttcagcttatcactcgcgtagtaggctttcaagtcctgaattttatgaatcacccgggagaaccgcatggtcatatacagcaaaacactatgatcgtcgggagaggcagccgcacccgtcaggcgctggatgtattccgcagcggtctgaccccagttccacatgatgtagaaggagaggaatagaccacccaagggatctaagtaccagagatttgcagcagtaccaactacgatcggtggctgttagttggtactctatgtagggaacaggaataagactgacccagtgggaagatgatgctgaacgtgttaaagacaacgtcagtcatggcatcctgggccaggacctggacgcttgggctaggaatcaatcggcaccagatccagcagaggagcttaaccaaaactgtaccgcccatcagcgagattgatgggatggatagcttaacaaccgtgcggtcgtccccaatcaattgtttgatagaagacagcgctacttgaaaaaaggaagtcaccatgatcaccgagaagatcaacacactgacaggctctaaccggcgtcggctgatgggataccggttgcgatcctgtcggcggatcataatggtggtcacccagacaatcactgtgctaagaaagtccaaaaccccatcaactagacctgcgagcatagacatggagttagtcattgccatgatagcgatctttgaagctaggagagcaacgttggcgacaaaattgaggcgaatggccaggttgatgacgcgctcctcgtcatctagggacattccaccatgcgattcgaggtcagggaatggctccaatgggctgtcttctgcgtcggaagaatgaaccaagggtgtcgtctcatcggggatccgataaagattatgcggggtgcgtttgacccttccgatcttgggattgggttctggtgcctcggtctggttatcctctaacgcagacggctgaagaattctgtttcccgaagaatggtgattgcatccattgtagtcttcgatcaggttatggggtagcgaagaatccagtagtcggtcaatatagagatattgggagatcagtccattgtttcgttcatggtatttccgactattccgggagtcagtgcctagtttactgatgtgaggggcaagccgacatttcctttggaagattctttaatgactcgggtgatttgtagtagcgtttcctgcggcgccggttaggaccgtaattgcatcaagaaggagagagatagtaccactcatatcgaggattactgtgtccaatcaacaacgatccgcgtctgagaataagtcgcctttcaggtgtatcgtcatcgagatcgttcaaggcaaggctcgatgtacgagaagggaaaaggttcaatatgtgttggcctctggtggaaagaatttcacgctccggttctaggcttggacgtcggggacgtagaacgggcgaaggcgatgatggaggggagaaaatcggaagaaatgtttgggaagacatcaattggtccaccacggtgaagaagtgaagctagtaggagctcttttttttgtgcaaggtaggacgcgtaactagttggttagttatggtcacatgacttctgccttggtgattaggtgtcgaggtcaaatataaacatcagcatagtataattgcatcggttgtattcaatggtagaaaatatgacacgatgcacgatgtatatctgtatacaatgtatgttggtcgcatatactccgtactaaggctcaagttggacttgcctaaagtggaatagtggctgaatgcttcggtacgtcgaggccgtacgttcttcttctcttctcctcatcttctcatcttctcatcttctcatcctctttgttctataaggctcggaataggttcagtattccatgaatatttcatggaacctaacagtatcaaccatattgccttcatctcaggtccgatcgacactggacctgacaaatcctactttcacactcactacttaacccaaatcaaccacgcggtcaactgcaatcacctctttgttattggtcccatcccaagtggtgtggatgcagatgcactcgcatacctcttggcataccctatctcacctagccgagtgaccatctttgtgactcaagccgagaatgggatgtggggggcgcatttccgctctttcggagtcaatgtgcgggtagtggaaggccacacgagtcatgatcgagatgcggctttaacaagtgccagcacgtacgatattctacgggtgcgcacaaagaaggaggcgaaggccttttatggccacatgtggcgtgacgggcatgtcacgaatacagagcgcaattggaagcgacgtcgaggaattgcggagtatgagattgtaggagaggagacgatcaatcgttcaatggggtatgacatgggaccagccctaagcaccggcaggcgtctattagcacgagtcagcaaatcttgcaaaaagccgaacagttgagccacaaaatagccacagagaagagagagcacaagagaatatataaagatcaatacaaagaatggggttcccatcattagcggaaattggaagtctcgttgttccgcggggaaatcattgaggcgagtgcggaatgagtattccgtctatgccgcgcagtggagacatcctcccccggactgatgcgttgttcgttgacctataagaaacggcttttactgatccggtggcttatgactggctaatgaacggccatgttaccccagctcttgtttccccgagttctcgaaactcggaaatatgccgtagccgagccaaagaagaaccctgagatggagggggcctataagagatgcatgcgtctcccactggtcatgaaaatctgcaatttcttgtcaaacttcctctatcatggcgatccaaacacttgcagtcgccgttatcacggtggtgtatttcatcattcgctattttaaccgcaccgatatccctaagatcaaaggcctcccggagatccctggagtacccatcttcggaaacctcctgcaactaggagatcagcatgcaacagtcacggggaaatgggcaaagaagtttggaccggttttccaagtgcgcatgggaaacaaggtaagtgcttcgctttcacatgggaggtgacgagggagtttgtaatctaatgtccaattagcgcatcgtgttcgccaacagctttgaatccgtccgtcaattgtggattaaggattcatccgctctgatctcccgcccgactttccacactttccacagcgttgtctccagctcacaggggttcaccatcggaacatcgccgtgggatgattcctgcaagaaacgccgtaaggcagccgccacagcgctgaaccgaccggccgtgcaatcctacatgcctatcatcgatctcgaatccaattccagcatcaaagaactttaccgggacagccagaatggcaaacgtgatgtgaatcccactgcatacttccagcgatttgccctcaacaccagtttgactttgaactatggcttccgcattgaggggaatgtggatgatacgctgctgcacgaaattgtgaacgtggagcgtggcgtgtctaacttccgcagcacttcaaataactggcaggattacattcccctgttgcgaatcttccccaagatgaacaaagaggccgcagacttccggggtcgccgcgataaatatctgacctacttactcgatatcctcaaggatcggatcgccaagggtaccgacaagccttgcatcactggtaatatcttgaaggaccccgaagctaagctgaatgatggtaagttataaaaaattcccgtgtttgttgaactgagtactcatattttgtctagccgaggtgaaatcgatctgcctgactatggtgtcggctggtcttgacactgttccgggtaatttgattatgggaattgcctacctggcatctgaagacggtcaaagaattcagaagaaggcctatgatgcgatcatggaggtctacccaaatggggatgcttgggagaaatgcttggtagaggagaaggtcccctatgtaactgcactggtcaaggagatattgcgattctggacagtcattcctatttgtctgccacgcgagagcaccaaggatatccaatggaatggagccacaattcctgctggcacgactttcttcatggtaagccgctccttgtttctgtcctattcgtaaattactaacagagcctttagaatgcttgggctgccgattacgacgaagatcacttcaaagatgccgataaattcatcccggagcgttatttggaggtcaacgagggcgcaggtactccacactacgcatatggagctggttcacggatgtgtgcaggctcacatctcgctaatcgcgaactgtttactgcttttatccgcctcatcactgctttccacatgcacacggcgaaagatgcagccgaccgaccaatccttaatgcaattgagtgtaattcgattgcgacagccttgacaaccgagccaaagccattcaaggtcggatttagtgcacgcgaccctaagaagcttgagcagtggatcgccgagagcgatgaacgcaccaaggatctgtaagaggaccatattttggtttcctttttgaaaagaattctgttcaatgtggtttcctctatttttcggaggccatttatgtatctacaatatgtgaaatgaaagacaagggagtatagatatagacccgtgttggacctatataatcgactttggcctctctgcaggcctttaagaacctgaatgtagattagttatctgctagttctgagattcaattcctaaatggcacattttcccagtctataccagtctgtctcatttgataattcccccggggttccaaggtttgtggcggtttccccggcagaatctccccgcattttctctccgcacttttcttcctcttcaccctattccgttcagttgacatctgatcgctttaaattgtcttcaattgcatcgccttggatgatgaataccccgcatgtttaccctgcccccgagagctgggataacccacattcggtcgatgatacgaacgatgatcgcccgcggaaacgccgcaaatacatcgccaaagcctggtcagtttggaaaggttctcattcgagatggagtcctaacgagatagtgaagtaatggatgtaaacgtcgcaaaatcaagtgcaatggccagtcaccctgccagcgttgcggacgccagcatattgagtgtatatacgttgagaaccctcgagacagtcccgccgaacaagagtaatgcccaccccagctcggggcgtttaaaacaccactaattatgctttcaaagcaacttcaagctacttttcgatcaaatgagggccacgcaggaccagatttcccagttgtctgccagtattcggtcaatagccggcagcgaacattctcctgggggtatttccgctaccggcacctatgggcagctccatactcagcgtccacttagacgcctgtcaacagctagagagacatcatttcaaggcccgacgacatcggcctttagttttgaccttgcgaaatctagcctgcagcagcgcgggattgtggaacgtgctgaggctggcgacgagggcgatatgactcaagaaccttcaccgctggcgtcgccatcggcaccaaataaggaacttgaaacacaccaggctcttgatccactttgtgttcttcccaaagccgaggcacttcgcctttgccaagtctatgaggaggaaatgggcatcatgtacccggtcctggagctttcggagcttttggaccaggttaatcttctctacgggccgagggaccgcgcacttggaccgaccgcccagcccgagggacggaatggactgtttcgcgaagacgtccatatcctacgtgtagtttttgcgtgtgcgttgaccgctgaagccagtggtcggagtgaacaggctattgctctctttgacagtgtacgagaagttcaggacaattgtgtctggggtccgcccgaaatcaagagcatcatatttctgactctcgtggttcgtcatacccaatcaaatatgaatgcgacatgctaattacaacgatagtcaatgttctattttcaaatagatgaggaaattttagcgtggcgcactgttggtattgttgagcgcatgtgtctcgaaaaaggtcttcatcggcgggaaactctaaatcaaccggcaatcatggctgttgggaaagatcgcgttttgcgactcttctggtctgtatatattttggatatgcgttggagcttcgggactggaatgccgtttgctctggaagatacagatattgacccttggctaccagagccggccgagaaaacgccctatctgcgcgtgatgatccggtacagccggatcgcagcgaaggtatggaagtttatatcagcattcaacaacacaaacgaaatcaaaaaggaagagatgaactatttggattggcaggtgttgcgttgggtgcatgccattccagactcgttgcggctcgaacatccgagttctgcggagtctgagactgctaccgaaggctcacggagcctgcgcagactgcgtgctctcctttatcttcgtgctaatcagctacgcatgctcattcaccgtcccgtccttcatacttcagcgcatgttatgcggtatccaggcgaatcagaaaccgtggtgaaaatcgccaaagatacaattcgcttcattacccgcttgaacgatacatcggacatctatcatttacagcaggtggcttttaattggtttctcgtctcagcacttgcagcgttattcctggcagtagcccaggctccaacacaattcagtggatcatgtaaggaggagttttactgggcattggagctggtcaaaggagtctcagcccagtcttatatctctcgccggctatggaggtctattcgaagcctccgtaagcttggtcctcaactgggtctggggcttcagaaaaagtgcctggatatcgaagcgggagtcgaaagtgaccattcaaatgtccacggttcccccgcattacccctttctgccagtagccagagtcagacaccacaagacggggaacagatgacacaggagttgatggagtggtttgaagccgtggggaatctggaggaccaaataatgggcatggggacgggccctatgccaaatggaggaccttaccagcaaatgcccgacggggggtttgtgtttgattacggcgaagaattgtcaagtgtgatgagagatttcttctgattatgtacaacatgtgtcgatgtgaagtcttagacatgcgaatttgaaaaaaaaagaaaagggtgggggaggttaagactgacaatatccaacattgtctccggatttgtggttacattaagaactctgttctgtttctgatttcatgataatatgtgtagtaccccagaaagaatatcccaatattggagaggagaaaaaaagacagacgtgaagcaatatatgaatgtgaattccccggggtattcgatttcttcccgtgtgttgtaccgtgccaacatcgaggttgaactagtagatatatttaaagtccagttccccatcgcccgtttggactcgccgagtctcttctctttcaccactgataatttgctccttcaccttgttctcttgccgcaagtagagaccatatacagttactgtgacctgcgccaccgcaagggaccctaaggagaaggagttacccagcacataaggtgatgtgcgatatacctgaccggcaacaataccagaacagttggcgactgtctgctggagaccaattgcgagagcacgacggtattgtggggcgacattcacgttcagccaggcgatattgagaccaacggacgtgtaggtggtgataccgatgagaaaagtggcaaagtataggacggctgtattctctaccgtgagaagtatgatgtaaccgacgatgccgaagatattagctgcgaagatgtactgtgaaagagttagtgagaaacggtgcactagagattgcaaggggctaaacgcaccgatgcaaattgggaatatcggtctgagcaccaagcaattgcgataaagatcatggcagcccagacatagactggaaccgtcaagacgttgctcatcagggagtcatagcccatgccacgcaagatagttggcaggaaagtgctgaacccatacaagagaatatcctgacagaactggatgagagcgctgaacatcaacttggggtctctgattgcgatgcgcatttcttcccagctaaactcttcacttcccatatacctgcgacgctgctcgttgcgtacccgcatcatccatttctcctcttcggtgaggaagtaggcttcagccgggttatttggcaaaccgaaccagatgaggatggcacagatgaagctaaacagcccttcgatgatataaacccatctgaaacattgtaagccacaatatccttttgagtgggataacgagaagcatacctccatcctgctttgccaccaatcccgtccatctgcaagagcccgtaggccaagagaccacctacagcccccgagatggcagcgcaactcatcaaataggaaacgcgctttgcttgctcctctcgacgatagaccatggttaggtagagattgagacaagggaacagcccggcttcgcaagcgcccaagataagacgagtcgcgtagagagagcctaccgactggataaatccggtgaagatggtggtcagggaccaaacgatgcatagccccgtcaggatgttgcgaggtgtcaatttcttcatcatgaccgcccatggtgcttcgaaaagaacatatgtcacatagaagatggagacagcggtcgaaaactgctctgttgaagcgttgatatcctcaggcatattggcaaccttaacatttcctaagctttgtgagctttatgctctttcttggagatttaatcaaactcaccgatactcgatctgtccaggaaacaagtgagataggtcaacataatgatgggtacaaaggcagtatccaacttggcgaggagttttgcctctttctttggatctaacaccacatccaaaaattcggcgacggcataattggcttcttcggcatcctctttttgtaaggaatctttcagctccaagggtatattgtgaacggtattgtgggacatggctgcaatgggggttgcagcaaaatcgagggtttattgaaacaagtcagaactaatgaccattttaagaatgtttcgatcgtgacatagtggatcatagtgaaacggactcttatcttgggccacgcgatactggaagccgagtccactgtgagtgggtctatcgggccgatggtgataagagatggcagcaggtgagaggttgaagaggtgaagaagggccaatagagggccaatgagaagggtattgaggggatatcaattaatgcaagccaatccgatgatgcgaacagatcctcaccagaagaggcaagtcgatacggaggtgcgcgtatgtagtgggatgttcaggtgtaagagacctaactagggttaccatccccgattaataatctgccggcaatttgattctccaccagttgaaacttgacgacagcgggcggtatatccctcttggaaggcggtgtactatctgtggggtcttccccaaccttttccccagacctatcggtatgtggattccgaaaatgataaccgagggtatctgattgtcaagaggtagatattaatatgattgatatgtaaattgttaccttctacttttccgagaggaagctcaatatggacagtctcgcccagcaggcacgactgcgctgtcgctacaatcaactgaccaataccgcgggtgttgcaccgggatatttacaagcaaatcttctggtacttccttcgaaatatgctgcggatttccatgatttgtgtttgcgcaacccagttccttgtcccttactgggaataaccactgttcctggtgacccaaacgccgttagaccggcagaatgtattcggtccggagattttgatattcggacggattttcccaaataccgagtatattcgggcggaaagtgcattgagagtcggcatgacttgtccgatttatggactaaggaacatgtgggctttttaatcgggtgttcgttctcctttgaggatgccctgacggcggctgggttgccaccgcgtcaccaaaagactggcaccatagttgcaatgtaccgatcaaacattccattgttacccgctggaatattcacaggcggccactgtattgtatccatgcgaccgtatcgtccggagcaaatcgagagagtgagggacgttactcgggcctatctgtcgacgcatggagagcctgtcgcctggggatgggatggtgcgcagcaactaggaattcttgatgtggcaaagccagactttggagaacagcaaatgttcgaggagggcgaagttcccgtgttttgggtaagttaggtagtcacatatccaccttcgacggtttgatctgacttcatcccaggcctgtggagttacacctcaaattgccgtcgaagcagcaggtgataaaatcaaaggtctggtctttgcccacgagcccggacacatgctagtcacggattggacagcagaagacctgcagaaactcaaacccggaagcatctagaacaaaaaaaaagaaatcaacatgaatccatacaatcatcaacgtgatgatacttctcggctctattctcttgtgacccaacacagtatcaacttgaaagtcttcaaacaccatcgcgatatcatccccaatggcaacaatgccaacgaccgaaccagtcaggttgtaattggttagggggtttgggccagatggaagttgtttcatattctttgtggttattctaatgtgattcctcggaaggagatctcgtctcttcatcgaataccttctttcccctataccacgtttggcacactcgagcttcttaaagggactccggtgcccagatcatatcaaccacaacgaaattggctttgaatcccgcacgcagaatccctgtccatgattcagaaaaagacgcatatgcagtccccgcagtagctgccgacacagcggtcgcgagggaaacagcgcattcaggattgatggtatcttgcagggagggctggatagaggaccgccgggtggtagcaacgtagagattgggcagtgcctgatggttcgcagtgggggaatcggtgccaaaggccaaatgagcaccgccttcgacaaactcttggtaagcgaaagctcgcttgcaacgctgaatctcaagcatctctggccacccaccaaaggtcgctgggtcaaggtggacaggctggactgaggccactatcccgagttgaccaagtcttttagcgtcttcgggggttgttatctccaaatgttcaatgggatgacgacaggctggcaagtcctgaatttggcataaacagtcaatagcctgctgcactgttcgatcccaaactgcgtagatgacgcactgcaggccagcattagtagcacggcaaatagctaatgaaagggcatcggctggccagataggatcgacgatattggacaatccaccatatgcttggtgtaatcccgctgtacatccatccactgtgccgtcacagagtagtttgattccattgatacaaaattccgaggatatttttctgttgaaggtttgttgaatctcaatggcgcgatcaatgtgactgcagatatcggcatcgcattttgagtaaggtaccaaccagtgtaccgcaacatgcatcgggagctcaccacgctgatttctgtacatattcaacgccacccatccactctcccccatagccatatcgacgagtccagtatacccagcgcgttgatgcgcacggattgcagcatcaatcgcagccaccttgttcttcatagacatgacccggtccaaaaatggccaaacaacgtcgaattgcgccgcctcttcgagtaggccggacggggtcccattctgatagcgatgaatttttccgcctggaggatcgggtttcgactcagcctctagctctttgagagctgcattattgcaccacgttgagtgaaggtctaatgcctcaatgtagataggtcgcggatctaggtcgtccagtacagttgcggaagcgttaccatccgtaactgactggacccaacctcggcacaaaatgcgtggatctgatgggtgagttgctgcgtaggtggtgatggaactttggatatctgcgacgttcttgcaaggcaaaagatcgagtttctgcagcgatataccggagttgagaatatgtacatggccatcaataaaccctgggaggactattcgatttctcaagtccaccgttgatgctgtggcttgaacccgaacaatcgcttcgtcactgtcccaaccgacgtgcgcgagatggtcatcctcaactaccagtgtggagacaaagcgaccccatgaaccgggacatagaatacgcccattattaaaaatcgttgtaacgataatgatacggttaagggaagagggatggtgcagcaaaggtagcaagggtagttgactccttgagttgtcaaagttgaagttgagattgggttggtgtagctgacgtggacaaataagacacagacatgggatgccattggctgtatgagattgggcaacatttaaatggtgtaacattaagaggacatggaaagaaaaagcaatgaaatctttatttcagattgtcttattctatagacctctccttctctcggtgcgtattttctgtttcggatagctttgttgatcatatatagaaacccacacatctataactccatgtctttgaagataataacttatgttttgatgaatggaaattatactcggggtttcagtgtggattctcatttctgacaatagcgtggacgttttagatcaagatcgtaaaatcaactttctttgtgctagcaggaattcctaatagatatagttcataattaattatctacacaaggcataattcccgcgagaccactcttatatcagctagcttctggaattgtagtatccccgttcaaagtcgttgacccgatcgaggacaaatacaggtccctatggctgtggccatttttggattcttgacctcgacagatgtttaacggctcagtgtttaggagaattttctggttgtgttcatccactgaagaaaaatgttgctcctcattccaaagaatggcggaaatatgtcaattatttccgaccagggtatgctaaggttcaaagtctttgcaaaggatgtcaagatggaaacggtagttgggaaggtccatattgaagttcctatatatgctcatctctcgcgtagggagcatctactactgggctaggagtcttgcggcagctacagccggaattaaacttcttctattgattattttataccccaggatctcaacttggtgtatttgtcagtttatgcttcgaatcgtggcgccatccaccaccaatgacagcatgactcggttatctgagatatatggctgatgccggaggttatcttaagcctctcaacaattgctgagggaatccgatccaactacatccatagctttatatgtggtatttgttaagccgagacttcccggtcccgaaatctgcggtacataagaaatatcccacgcagttgagattctacgtgtgtaaggagtccggagtaatatgtatcatacgattcatacctatcaactatcatcaattgatcccttgcgaagggtggattcccgagatcggcgttcggcattgtctccgacaagtggcggggacattcagcactcgaaatacgtcaatttgtcagccgatggattattcccagtgaatacataaggggggaatctccacgtctctgaatctccgaatctccgaatagatcaattgttaatttctagagaataaataatgggatctcctttgtttcgttccccgccaatccaccgggccgagggtctgccctattttacccccgccaacgatgccggagcagctataaacgcacaggaccccagcatcccgacactgttccgccctttacgaattcgagatgtcatactcaagaaccgcgtgatcgtggcgcctatgtgcacgtactctgccgaatcggacccaacttctccggctgtaggcgcgctcacagattttcacatcgcgcaccttggtcatttggcgacaaagggggtcggtctgattataatcgaagcaacatcagttcagcccaatggtcgtatatcgcccaatgattccggcctttggcaggacgggacagactcagaacagttcaaaggactccagcgcgtggtgaagttcgctcatagccaaggcgcgaagatcggcgttcagcttgctcatgccggccggaaggctagcacggtggcgccctggctcgcatcccaagcaaagcaacgcggcatcaaagccgatgaaagtgtcggcggctggccctcaaatgtggttggcccctctggtggggaagagcagatttgggcacctggcgatcaattctggccccctcgcgagcttgaaacggccgaggttgaagaaattgtccgggcgtttgcacgaagtgcagggctcgctgtgcaggcaggagtggatgtaattgagatccacggtgcacacggatacttgctccatcaattcctcagccccgttaccaatcgacgaaccgacaaatatggtggtagctttcagaaccgaactcggttcttatgcgaggtggctgcagcaatccgtgccgttgtgcccagtggaatgcccttgtttcttcgtatcagtgcgacagattggctcgagaatcaaactgtcgcagaaggaaccggaagctgggacatgccatcctcaattcaactcgccaagatgttaccagacctagggattgactttctggatgttagctcaggcggtaatcacagaagccaacggattgagcctcatacgaactatcagattgacctcgctggccaaattcgccaagaaattcacgccgccaaacataagacactggttggagctgttggctttattaccgagcccgagtccgctcgcgatattgttcagggtgcagaagaagagaggcaggcgaacgaggcaatgctgtctggcctaaagccccaggctgatgccgtgttaatggcccgtcaatttctgcgcgagcccgaatgggtgctggcggcggcaaagaaactggatgtgaaggtatctctcccgcggcaatttgcccgaggcttactgtaaagtggacacatataattcatagaccaatctttctaactgcatgattgtaaacctgcggtgtccctgttccgagtctcagtacagactgtagtaccgcacatccatagtccaagactgagaaagcgggaagattctcgacgatcatttccatattggaattcccctatcatctttcacgaagacttcttctcaattttctatgagagggccctcgtccgacccttatccagcccaggtgacttgttgtatacgaatctggggcgaatggtgtacttgttatcaaccacgactcccgtgcgtcccgccctgtccagttacaagccaatgattgatcaacgtgcaatgccaagcaccgggccaagactcgggagccggtgttacaatgcatttggagatgaattggtactagattggcattgtttatgaggggctgttggcttgccctagcagataaagcaggaatataaaatcgacgcttccaacttccaacttgctgatgctctctgtattcatcctacattcttgattgtaggcttgattactcaacgcattccaaaaaaaaaccacaatgggaatctctcgcactgcctgggttctggtcttcgccttccagcctttccttggcggagcgttgcctgccccctcaccacctgggatcccgtctacctctactgcaacgagtgagctggcaggattgaccgttgctgcacagggatcacaggatggatatagccgtgatgaatttccgcactggattactatcagcgggtgagtagatggagtcactgtgaacctgaagtgttggctgctcaaattgttggcgacagaaattgcgacacacgcgagacaatcctcaaacgggacggaaccaacgtggtccaaagctctagctgcagtgctaccagtggatcctggttctctccgtatgatggcgcaacctggacagctgcaagtgatgtcgacattgatcacctcgtcccgttgtcaaatgcatggaaggtgagctcggaccatctgacaacattgaccttgagatattaatgaatattcgcagtctggcgcgtccagctggaccaaagcagatcgtcaagcctttgccaatgacctcacgaatccccagctcctagcagtcactgacaacgtgaactccgcaaagggcgacaaaggcccggaatcgtggaagcctcccctaggtacgtggtaaaccatgtgtattgtctagtctatggtttctgacatagaacagcttcatattactgcacttacgccaaaatgtgggtgaaggtgaaatcggtttatgatcttaccgttacttcggacgagaaggctgctcttgttgaaatgctagcgacttgttaaaaagtttgaatacgttgtagtgagaatcaacatcgaatttgcattcataggatttgacacctaattttctaaacgcgccgcaatcgtacaattcatgtcctaatggaatcataatatagaagcaggtgatctaaagcagtatcgtagaaacgactgtgctccgcggactgaaaaggggagggcactgggaccagcggcacgaatcgaggggactggaaaatggccgagttaagtgaaagaagggtttatccggtgatccaaacttgaaccggcattcaaggaaaatattgggaatattagatcataatgcaatggttgttttattgaactaagaggaagtgcgttgttcattaaaatagtctgaagtgtcaggcaccgagatagatgacacgtggtagtcacgtggcaatagagcttggccggaacaacctgggaagttacgtgttatcgggtgactttgggggggaacgatattccgagatttcgttatcggagcactccggagaaagggaccggaacattgacggtccgaatccatcgacggggtaatgacatgtacaacagcctaggacggagtactccgccgtactccgtgcttcatacagaactatgtgcatacaacataattctactattttctactatctactattcataatctcattatttgaccaagcattgccttgacaaaatatattttccttgatctatgtggaatcatcatcggtgtcctgaaggctgacacacgaacgatcatttcttcacctttactaatcatctattcgcccggggctttgagaaagctgtgggtctgaggattttcaagtggagttattttcagccaagcattttccaatgatgcttcttgtccgcacgaaccataaaccaggttttgtggcaagccctcgggggttggatatgtgggatcgagggctccgatttctcggctcacgaatccaaagtgtttcgtgttcttgacccggcccccgagcctcactctttatgctcccattattattagcattatgaccttgccgggtgagaaaaaaactaccgatgagcttcaggatgcggagaaaaataccgatgcctgtcgtcaaagccgggcattgcttttgtcggaggaagaagcccttgaaaaagcacggagcagtcctaatgacgcgctaccgattcagataatatacgccgccagtgacccagataacccccggaactggccaaaatggcgcaaatggtatatcacctgtgtggtgagcatgctcaatgttttcacgtacgtacacttatcactccttcccagtcgaggcttatctcactcgtcccatacagcacatggtgcgcagggggcatttcctccggtgctgccggaatacaaaaagagtttggggtatcggctgaggtcactactttatgtttatctctatatattcttggatacgcaatcggccccgtccttctcgccccactctccgaatactttggtcggcagccggtttacgctgtatcatggtttggtttgttcattttccagcttccgctggctatggccccaaacatcggtactgttctggcatgtcgattcattgcaggctgtgccggaggtgcgcccctgacaaacattggaggtagtatcagcgacctctgggaacggaacgagagcggagggcccatggccgtctacgggctgagtagtacgtttgggcctcctatggcgttggtgatcaccggttatattggacttaacctcggctggcggtggatattttgggttttgatggccatgacgggcggcatgtgggtcttgttggtaaccacaattcccgagacacgacacaccacagtgcttaagaggaagaccaaacgcgcacgcaagcagatgaagaaagagaatcttcaatccgcagaatctaccaccgatatgcatgcgaatagcagaaaagggctttacgaactattcgctattaccctcactcgtccattccgatttcttttttcggagcccatcacgctgttttcggcaatctataatggctttctgtatggattggtatatcttttcaacgaggcgatccctctggttttcggcgctccgaaagggcacccattcaataccggccaacagggacttgccttcttgggactggcgattggaccgttgattgcattctgtttctacccactacaagaacgatactatctgcgccgggttgccgagaacggcggcaacggcgttccagaggcgcggatgtggatggcccgtgggggtgcgattctcattcccatcagtctattttggtttgggtggacaagctatcggtcggtccattgggttgtcccaatcattgcctcgtcattatttggcgccggaatttatgttgtgattctgagcattctgaactacgttgtggatagttaccagacgtactcagcttcggctcttgctggtgtcattctggcgcgcaattttgtcggcgccggattcccattgttcgccgctcagatgtatgagaaattggactatgaatgggcttcctctctcttgggattcatctccattcttcttgtgccaattccattccttttcttctacaggggaagagccattcgcctacgaagcccgtgggcgcgggagtacttcgaccagaacgaagacagcccgcattaacaactttcggggatagcctcaacttcgatttgaaaagcgtgaaaagaaaacttccttgttaggaggcatatcaaatgatgtattctcaagttcaatagcttgctagacccttaatctcctagaagttttcagttgtactgaatatgcgccgatgctcaatgcgactacaatcctcatctaggagatttatagtcgctaacacatcaagatgtaattctgccgtttctcatattgaaaccgggtgtaaaattggtttggtcccgactgatctatgcgcccttagtgatcaatgatcatctgctcatcgtccccgtgaggatgcaattacccctatctttttagtaacgttattgaagagctgcttttccctcacaactgcaaatccggatagattatagtcgtcaatttcagacgaaacacgtagtgaagtatcccgccgtagtctattagtccccggaaaacttgctacacttgtttgtagagatattaagggccgtaaccgagtcattgtaaactttacagatcaggcagtgatacttccgggtcattatgacttgggaccacaaagttgacatctggagtgtgttggcatgttggtaggataacaacctatgcagtcacttgcggtcaccgtgaaaactgacattagctcagatctaggatctttttgagcatcgccacatttgaagggctcgaaatcccgctgaacttgatgatgggtatcctcttgccgaaatgcaggcagtcctgggaagccctcctctcaaactcctcggtcggagcgaaaggagccaccagttttgggatgaaaaaggtttgtgcggctatcccctaagaatgattcaaatcatatttgccaaatttaataattgtatcaggtaattggaaagtgcagatccattgtcagatttcaacctcgaggcgctagaagagagactcaaagatgatgcaaaagaggaatttttacgttttcttcggcgaatgctatgttggctcccagaagaaagagcgtccgctaagctgctttttgatctttggttaatgcgtggcctctgtaaatgagaccatggataggtcacttctgatgatatgcattcatttatccatttactaatggtacagagggattcagtaattcattattgtcaacataaggaaaaagccaactcattctcggcaataatggcaatacttggccaatcgggggctctacagccttaggaatcagttcctcatagtcgtgactgtcacaatccactacagatcgctatcatctacttcaagtttgtttgtttgcttacttgctcgtttgcttgcttacttattgtttgcattgtttaccagtttctatgatatagattgtttgctagatagctaagcgagatattagaggtgtacaatgtttgcaaagggacagctatatcaacaggctgcctcccacctcctaccttgcaacttgcttcttttttctccccccatcttagttattatatattgaacgcaatcttctatcttcgaaaaacctggcacgtcatattggtaatctagcaaataaaattcattctaaccccctttagaaaaatcctcttagaacctataactatgctaactaaggctgatagcgacgaatggcatcaagcgcgagtgcagtagaaatacctcggttcccagccacagtctcttagaataatactgatacagagttcccatctcccatccaccatccaccatccaccatccatcatctggctcttgtatcgatagtaagactttcagccctgaaatatgacgaaccccaacttggtggcaaacaatcagtcgcatggcgagacttaccgcatccactggcccgaatctgggatcccgctctctcgatggattttttttcggagtggagtggccatttttcctcgattgttgttttgatgccaaaagtgcaagtaagcatattgcatacctgggcacatcactacagtggtccggaggggctagtctacggtattgtagttcaggggtaagaatttatttctttgtaccagaggggataataactgcaccctcatatcacaacaagaagaattgcagtaaaaaatgctgaagtactcgggtctctcggcaagtctaagtgttacgtgccaattcgattcagaagaaaagagtgcaattcaaaccagaatctaagtacaaagaaggaaaggaaaagagaaactatctgtgtgcgtgttcttcccctttgacgtccttccgtttgcattcgatgcaaaactcgcaattgtctcgcttaatctcgtttgtcattctaggaaggtgcgaggccgagggcgtggtcgttcctgcctgtttggtaggtacgatccttcctagatcgtcatactaagcccctaagcagtggatgagctaactagttagttaactaggttagttaatgatatgtaatgggtgactaagccagttacagggttggcagttctttacactatacggagtagtatcggttgaattctccaatggtgactagatcgactaagaccataagaacgtggatcctgcgaaggacttggcggcatgcgagtgtcaaatcaatcatagtttcggatcagattagttggccaagccaacggaaatcttctccttccacgcgaatcttggccgaaagagatttttttatccttctgtttcctgatcatccccctttctccgccttttctcttgaattaagaaaattgtaatcaagttgcttcgtattgtacgaaggagtattgttatgttcactcaaactgccaaggaccaggaacaattcaccaacgatcccctggacgggcagacgccaagatgccaagactaaagaggtatggctcggaatcttacgtgtgaccgaacactgattcctattgactataattggtacggagtattatggacgaatcttacaagctgagagtgtaaagttcttcagtcttctctttatcagattccatctaatctgataaagctgatggcatccaataagtaagtctggaatactattgccactgggacatatggcagaactttcgaacgaattaggaaaaagcagaagaccctgccagacttctatagtggtgtcttcagtctattccccaccgcaatgaggctatgcagaaaaattcccccacatgtctttgattatcaacggatctgataggggaaactagctttgtcttacccgaacagtgatttagatctgtcgatctgtactatgcaggactttcaggcttttcttggcctctcttggctcattttgcgcgatttccatgagaatatgagcgcagtagataagttcctcccatcttggtataagaagattcgtatccttttctgagcataaccctcttcagtcaagaaccaagggttcaatataccactatgagccccttcttcctggtagtcagcctgtggcaagccacgttggtaacagcaagcgctctatgtgcgactggctgtcagactgcggtttccaacaacgaattttcaggcatcagcatccttgaggactattattcagctttgtgccaaaactccctccaagtgaaggcaacattcatttgtatgcgagactactgcccagaagacgaaattgcaaaaggatggaatgatctcaatcaggtgtgtgaacaagatggaggagttgagcttcttccatggtctatcattgacgatgtgacggacgcggagacaaaatcttggcctatcttgacctatgaggatatccaacttggctctacctttaacacctcagtttctgtggatcagagcctcttccaacttgcgtatcagacaaatgtgagttatactatatcactggatctgattgatgattaactggtgtctagttcgactgggatgatcaaactacgcggcgaacgaactacgggtaactcatagatccacccactcccttggttttcacaattacttacgcacataccttcctcatagatatgctacaattggattctggggattgatagtactttttggtgcccttgacaatcttttccgatatttaaacaatttgtctgtgctgcgctcgagaacaatgacaagattcgaaagctccgttcgccgactggtagtcgtgccaccgatcttgaagaaaagtccattcacgcgcttttgcggtattccttctacatcaagactacaagccatgactatctcggccttcttcgtgatcaacataatcctcatgtgtgtggaataccgtgctttcgaaaataatctttagtgagaccagattttatcctcctcctgattggccaaccggataatgagttgactgacctcccttcccatagcttcacccgaaagtcctcacagctttggcgttatatagcagatagggcggcggtcatggcgatcagcaatttaccagtcatgtggctcttttccacaagaaacaattgtcttttgtgggcaacatcctgggaatttgggacctttaatacctttcaccgttggattggaagagcttgtgctatagaggtatttgtccatgggatgggggtttgtatctatcaatatcaaggtgtgtctattcgcattcttttcgctggaggcctttgagaaaatattcccgagttggattgaagttgacaaagtttgagaatgaagaggttggaaaggagtttttcttgcctctctggaaagagcgtgacttctatatgggagttgttgtaagtcaaaaattccgtgtattctctgccttagctaatacgctctcacaggcagctctctcgattatcgtgacgtgccttttagcaagctcgggaatccgaagggcagcctatgaattatttttgatagttcaccaggcttttgctgttcttattcttgctgcgttgtggtagtgagttcctttcagcatcaacttttaggaacatgcttgactaacggaatttccagccatctaactgtcgatggcccagatcatgtcccatacctttggccttgtattgctgtttggtcatttgatagactgggaagggtgtttcgtctattgatctggaacaagccaacttcacactcctctggagaatacaacagtgacgcagatctcattcaggtaaaggcccgcatacgacgagttgttgctcctcaacctggaagttacttctatgtgtatgggtggcggtctctttatttttgggaaagtcacccatttacacttagcgggtggactacggtcaatacggaagaagaatcttacacagaactcgtatttcttattggagtccacggaggcttcacatccaggcttcgcaaacagctgcttcgtcaagatgagtccgggatcgactcttcatcctctgtgagaaaggttcacctggctgttgaaggtccttatggtccacatttcgatccgtggaattctgaaatggccgtttttgtcattggtggcgcgggtatcacgatcgcaacgtctttcatccaacagctggtagatttcgtgcggcttggcaagcacgtggatcaaaagatcaagtgcttgaagataatatgggccataaagaacatcgagctttatcggttcgtctatgagcgctatatatcaacgtgggaagtggtcttcgcatcaacatatattgaaatctcactggacgtgtacctgacaagcccttccaaggcggatcaacaagttgaattgccgatgccagaatctcaaaccggacacagtgcgacaaaaaagaaaatacgagcagttgtatcgccggtgtgttcaatgaactttcatgcctcggaggaaaaagtggcttctgaagaggtgcataaccagtcagcgtttgggcctctaaaaacaaatctcattcacggaaggccaatcatccgcgatgtgattagaagccaagttgaaagcttcaattcttacccggagcaacagattgcactgatcggctgtggaccggatacaatggcacacgacatacgcctttcctttgcagaatcctcaaaagagactgacgtcaacattatctttcacctggcccctttcggctggtgattgatgttcttgtttatccttgaacctggaataaatattcaatgattcactgtactcatgtatttatgtcacattttcaccgcatcgatatgaagttgaaatgctatcctcgtgattatcaaggaatgtgtcttctccgagatactgtagtacttagggccatcttcattcttgtatagcactattagtgggaaggggcttagtggaatggaatttctggaatttttgcaaagggagctatatcaacaggctgccttctagtttgcaacttgcttcttcatcctctccctatcttagtagttattttatatttgaaagaactgtcacgtcacattaataatgtagcaaataaaattgatactaaccccttcagataaattctcttagaacctatgtgctaaccagggctgacagcgacgaatggcatcaagcgcgagtgcagtagaagtacctcggtttcctagccatagcctcttagaataatactgatatagagttcctatctcccatccaccatctggttcttgcatcgatagtaggaatttaagccctgaaacatgacgaactccaacttggtggcaaacaatcagtcgcatggcgagacttgccgcatccactggtacactaagacgttcctccagccgcttaataagcaatcctcgcattcgaatatagacacaaggccgatgattcttaaggcgtaacatcatgcgcgataggaagaagaagaatgcctcagggagtggatagaaggcggatccgtggatgtaagtccgtgtttggaggacttggtaaacccaatcaaaggtctcagagagctcattaccccagccatactggtagaaaatattcaaaatattgcaacacacgattgggtccacacgcttcttgaagtcagtgaagaaggtctggcggcccgcgggtggaagatgtcagtttttcaaagagctcacagttttctccactggtgaagctcatacctgcatcagaccatcagatgttcgatactgaagcatcttgtccatcacaagattggcaacgtgagtgggccgattcaaaattgtaataccgagtgatgtcgtgtccatatcatcggggaagtcagcttgggtaagaacaggtgtaactactctggtcagtctgtgttaacagatatgcagacgggcaatgatcactttcataccgataaaaaggttccatgtggtccgatggcttccaatatcaatcaagcttctgttctggatcagctaattgaataaattattttccgggctttgacaaacctgtcgccagtgagctcaagtatgagcagttgcgtgaagttttccttcactggtacgccggtatgggtgaaggaatggtgtttttgagcattctcatggagatatcgcgtacctcgcccaatagggtcaatgtcgacaaaattcaaaatgctgcggtacagcgaataatctgatggcataacgccctgcatccccatagacattgcagcaagtaagttactcgtgtcatcatctaccaagatgacctgctccgagctcaatcctatctgatttaggacatgttgataaaatcgcaattcaggcttctgcatgccgatatcacttgacacaaaaacacgttcgaacaaagaccaatcaaacccaagaaactttaccaaggcgtagtcctctttggaaaaatttgtaaccgcatatagctcgaagagacctttagacttggccttcattgaagccaatgcctccacgactttggggttcacacatagtgattttcgtacagcaaggatagctttctttatctcctcctgaggatggcgaaagtcggacgccagtcgcgcaaagtattgctcttcggtgatgcgaccacattggtattccactgttgctccacagtatagaatagacttgagagtatttgtgggaagttctatgttctgcattgaggaatgcaagacaatatttttcaactcaatcagaacccctttgtagggaatgcgcttgatgattttacccatgatgatatttccgggttgaggtggcatatggagaccttattgtcgagcactactaaatagtcgagtcgtgtaagcggtcaagtagccttgttgctacgagtcgctgagcgtcagcccgaccttgatggactgccaccacgtctgttgagaaaataccgtcagttgagccgaggccagtgtatgtatcgtaccaatgggaatttcatccctttttataagcggaaatttgtgctaattatattgaattcaatagtagcagcagagagtcattctcgataactctgggtcgtgacttgatccgtattgtggacggcaggttctggcgcactacagacagcgaaccaatattgcaggatctcaacctccaaatcaagtgcgagacactaacagcagtggttggaccttctggatgcggtaagacgactctctttgaggccctattgagagagcttccatgtccacttgactctatccaagttaactccgcatttgacctacgaaccggtgtcgcatactgttcacaacaaccgtggctcagaaacgacactgttcggaataacatcatcgccggcatgccgtacaatgaagcctggtacaacaccgtaattcatgcttgtgcattggaggaaatcatccagaagctgagcgaaggaatggtcggcagtggaggcaggagcctgagtggagggcagaagcagagaattgttagcatacctcaatgctgcattgagagtcacagctaacattccgctagtcgttggcgcgcgccatatactcgcgtcgcccacttcttctgcttgatgactccctttcgggaattgataatctctccatacagcatattttcgatcgtttgctgggtgttgatggcttgataaagcagacgggtacaacagccatccttgcaacacaaaatggtaagaacttagaataaccgacgcaaatatgcgagaataacaagaatacattagtggaaaactcaagtctctttgaccagatcatcactctcggtggtgataccactgtgctcgaacgaaaatcccatgccgacgctatgaagaattcagagaagccaatcggtccagggaagcttcctattgaggcgcccatttccatatcccagaatccattcgcgttcgccctggaagccaggtttgagaccgcggcttccgaccctcgcgacccccggaaaggtgaactgggggcatacaaataccactttgcctccttgggcttcaggaaattgggcctcgccgtctttctggtcgtatcttatgtattcttctcctcgttcccccgtgagtcatcacctgtcgatattcgatgattatcactcatctcattcgcttgcagaaatttggcttgaatggtggactgcttctaatgtagaccaccctaataacaggttgggctattggattggggtatacgctgtttttggatttctggccgtcttctccctgattactgcttcatggtttgtctcaatcatcacaaactcgctccttagtctgacattaaacaggctcatgctttgcaacatggtgaagaactcagcgaagtctctgcatttggaactggtccagactgttgagcggtgggtatccttttcggaagctgttagtgaacagatttgctaacatcttcacagggccgtcgcatctgtgttcacttctacagatccaggaatcacagtgaaccggttcgtctttcaaccgataagctgaatatcaacagctttttctgaccatttgaacagatttagtcaggatatggctttaatcgatatggaattgcctatggccttcgccaacactattatctgtcagtttgtgtcttccaaatacctgcccacgcgacttactaatatttctagccttcacaacctgcgtggcacaactcgttatcattgctgtgtcttcacgtcatcttggtgccgccatccctttcatcctcggcttttgtattctcactcaacggctatctattcgaaagtcacgacaattacggttctttgatatcgaagccaagagtctgttgtacacggagttcattgaactgctgaacggcccctatgtggttcgcgccttcgatatgcagaaggaatttgagcaacggctttccatagcactcgatgcatcacagaagccgttttatctcctcctctgtgcgcagcaatggctgggtttggtactaaatttggtgaatctcggtctagcgttgatcttagttggtgtcacaacagccacttgtggcctctcgggtggctttttaggtgttgcgctgatcaatctgaaaagctttggaccaagcttatccgaattggttgatgtgtggtgtatattgcagaatagtctcgccgcagttgagcgtgtgaaacctttctccgaggaaaccccgaaagagtccacagactagcctgttagcccgtcgctaggctggccccagctaggggccattcaaatgcagtaagtatgtctgggatacgagtcagtggataatattggctcgaaatacttagtcgcagctaatatctaacttgaaaacagctctggttcactcgccgtcaaatccctgtcacttgctatcccggcaggaaataagattgtcatatgtggccgaagtggcaggtaagcagcttccgcgggaatgtcaaaacaatttgaactaacatcagggtttcacaaagcggaaaatcaacgttgtgcatggctctcttccgcatgcttgatccgatatccggcaccatctcgatcgatagacaagatataactcgagtcccctacaaacttcttcgctcggcactttctattgtccctcaggatgcagtgatcctaggaggatcaatctgactcaatgttgaccttgaaaatcagcattccgacagagaagtcatcgaagcattagaacaagccgaactatgggagtccgttaaagagcgattcaggagagaagacgatacaagcgccgaatctctttccgggggccagaagaagcaactctgccttgcgcgcgcgttagtcaaaaacagtaaaatcttagttttagataaggcaacagccaggttcgccttgaacagtcagttcgctccaattttgaattcaactaacctgccacggtagtgccgactctgcgaccgatcaaagggtccatgggcttgttaatcgaggtctacctggaacgacggttgtttctgttatacatcggttgaagcatgttggtttgtatgatctcgtcgctgtctttgatgacggtgagctggtggagatgggtaacctggtagaactgctcgaggactcagcttcgaggctagtggagctgtttgtacgtgattgactcgatatatagccttgcgatagtatcataaatagtgcagtgggggtttccagagcaggatgactaagcggctatatgacataaaagcactcccgaggcctagatagtaacgtagatacctttctacctctcttctcagtagtcaccctatggtattctcctctctagtaccctactactcctagtaacgactctactcttatacctatttcgcaggtagggctgtcggtaccccttaggggtcccctctttatatagtgaccgatgtagggagtagcgttaactagtatattagggagggggtaactactaaatctaccttaccagccttttaccactccttttaccagttacctggctgaatgaacgttatccttaaagcgatatcctaataagtttctactaccttctataatcagccgccttagtaataaccataccctacgtttcagtcttcagtaacgtggcccaaccttgggctgagaagtcaggcccgaagcccgacccagcgacgggtcgnnnnnnnnnnnnnnnnnnnnnnnnnnnnnnnnnnnnnnnnnnnnnnnnnnnnnnnnnnnnnnnnnnnnnnnnnnnnnnnnnnnnnnnnnnnnnnnnnnnnnnnnnnnnnnnnnnnnnnnnnnnnnnnnnnnnnnnnnnnnnnnnnnnnnnnnnnnnnnnnnnnnnnnnnnnnnnnnnnnnnnnnnnnnnnnnnnnnnnnnnnnnnnnnnnnnnnnnnnnnnnnnnnnnnnnnnnnnnnnnnnnnnnncccccggggggggggggggggtcgggtcaaaacgggctttgatctacttggacctccctaaaaggtcgaataagaattaagcgagataaatgtaagaggataagaagggaagaacatatacttagatagtttctctttttccttttcttctttatacttagaatttggttggaattgtactcttttcttctgaatcgaattggcttgtaacatgaaatgctttatgagaatgccaggaaaccacctaaaaaagtcgggatcattgaatttgtatggtgccaaatgcttcatgctcatgggtaaggctggcagattactaagctctctgtaatggtaattcaggtgtccttacttttctgccaggcaaaattcagccattaaggccctaatatggtgaaaacgaccctgcgcgctatgccccttcgtacccgttgtcatagctgggatagaaacaacactcgattctcggaagaggatggcttgttccttctgtggacaacgggaagcgagatatggagaattgttttaagtacaatgaattcaatcatccattttttcgccagccaagcagtttcctgcgacaggccacggttctcagtatcacaaggcgaggttttttagccagccagtctccaggacctcggatttcattcccacctgctctcagtttgaatccacttcgatgcccaatgtcaacaaaattggattcgacgaagccgcccatttttgactatcttcccaaaatctggatgcctcttccaagctcttggcaaaaaggcttcaacaatatggtcgggtccttccaggtccagtaatccacatatctcagctcgacatgttcgaaaatcgtcacctgaataaagttagcttataccattctactgcgcatctagaacataatggtccatagaatttagatcagtggcataattaccattctatgcatagtggcatcgatgacaagcataatgttggcattccactgggcttcgattggcaccaacaagaactatgcctgcacaaaattccctgaggccataattcctgccgtggcagtcacagcattcccagcccatgcggattagatcctggacaaagcaatacgcttcaccacatggagaatccactgcaacatctgtgacagttctctcctgcccacacattgtctgtctccctgttctttggttgactctagcataacgacaatatgttatacctcgttggagaattcgatgtccacaacgatagactcgatactggcgaccacacattgtttttaataaaagccaaagaaaaatacgtgcagaatgcttttgtcgaccgaaacgatgtgaattggataaagaatattttgaatatgtcttcgttgagtattttaatcaagaagaggatcttggaagcttccttattgcttatatgtccaaatgcctatagtattgtcctatttttggcttgataatgcgacactgaggggctacatggcggttgccgcttcgaacctttggcgcttaggtctgaaactatcttagtcaattccactaattacatcatgtcaggttgttcgttatagaatatggtagcgttttacatcatgcgaatcatgacactctatgttcgaagtaattataggtttttagtgacgttacattaaccgccaactttgtagtctaataaatgaaaaagcactaagtaccgggcctcacttttcagaagctaggagaaagcagagggaggtcctcgatttcttgtatacagtaaaatatacataaaagagagaaaaatcatattcgacgaacgaggatactaaaactagatataattatatctcgagatctgactatactcggtctagaaaatgcgctcacctttaggtcatctagcttattgccgcccactactctccctcccctccaactttgccctgtgacagcgcttagtcgaaaatactttcacccgttaggtaatccaacttattgacccctcttctcctccatatgtggatgaaaatctctcacatccatgtctagatagtgagtagatgtcacattgcaggactcctagagtactgcatatttcttagtaaagagcttaatcaagactaaggaaaaagggaaacaagggaaaaaagaagtcgaaaagtcagggaaactggaattaggcagaggtagacaacgtacacagaatcaagatgcaaacatagtgaatgcatacaggaccaagcattgcaaccaatcacagattaatgtataaagagagtaaaggaaattgctgccttagcctatcagagggtgtaacagcggacagtagaaagtataagcccagaacgatagtcatctagtattcattcaaaaaggtaccgcttaatattttcaagtccctgcagatctccctcggtcgagttagacttctccttctcaacccaaccttcagtatagcctcctccaaaatcaatcaggtatgcatcctcattgacatcaatgagcacattggctgccttcgcatctccccaaatgatattatgtgaatgaaagtgttcaagtgtctgcgaaatttgatcaacccatttttgtcggagctcggaaaatttgggatcatgtccatcaatgcaattgagtgtagctctatcacaattaatgtatgataaagccaatcccaatatatacccatcatcatcttggaccagcccttccagttgtgatgtgagaattgggggatcgaatttagccatgcgaatctttgaataagtgagaatctctcttgcggtaatacccatgtcacccccatagactatcttgaagaagctaggccgtggttgcccatgaataaataccttatgaggtattcctggtagtgcagctgaatctgtactaattggaacctggacttcccttgggtggtagacagaaaaagctgagtagtcgacagaagatggtaaagatgccccgatgagatgatttctcatgttcttggtgttgctgagataaacgggaactaatttgtctccaactacctgcacagtgtagtgcaattcttctgcaaacagacaatcctcgagagtgtacttttggttcgggtccaggggagcaatttcgtgaaagattggcagaaatggttgcaagatccaatcatgcatttcatcaagggggtcttcaaattccccctccacatctatctcagactcatcaggaatccattctggttcttgacgttgaacgtgtcgaagatattcggccaggagggcaggcgagctttcgaagctggaagtaaaaagatcgatcttgaagcgtttgttggagacataaacattcaactgcgtgtttgtgtttctggtgcttgatctaaatggaccgatatcatagatgggttgtttccgtgccatcgttggccatcgaggagttgcggcaagggaaaaaaaaataaaaaataaaaactaaaaagtaaaaagtaaaaagaaggtaggagtaagaaactgtcaggtcgggggaagtgaggtgtacacggcacaaagtcatgtgactgtcgaccaataggtaagtccggcaaataaataaccatcttcaccgccatcaccctctgcaatacttgattggaaaagctacaggaaaggggttgagcctggagaaccgacaggacggtatgattttcggcctcggacgccatgtgagtagaaaacgaataaattgaaacaatgcttttctactgcaagtttgtagtaacgtatttttgatcactttagcgcccttttcaactcgaggatgatgaatgccaatcattagtcgttgttgatatatacccaggtgaaacgcctacggcggaagcccattgtgcaatagtcgccacagtctagattggtgcttgaattagatttcgagacatctagatgctgatgcaagtggccgaaattatctgggcgcttagctaaaaattatacgacggcaactgacatcgcgttgtcccctatccctactttcagggacaaaatcccaacaagtgcatttcacggtggcaaaggaaaggaagaccattagaggtttcatgttgtgcgtctcgccgtgtaatgcaacctgcgccgcacggaagtttcacctgcatggcatatccacgccaatcaaggttagcaatgcaatataacgtcattctcggcgtcaatcttttttaggtgtctgcttttggactccaaccctcttgggtaatagaagctcgtattccatgcgcatgtcaatgttaactgacgacttaagcatatgtgatgaaagaaccaaatagcagccagtgagaattcaatatctgggaagaaggcttggtgcaattcaagtatacagcatgtttagtcatcttccttgaaccatccatcagcccagtgtgaggtctcaatcataggaggggcgtcattgcgttattcggtggtcccgaggctctgtgcacgaggcaaactgaactgccttagttgatctggctatcagggctgggccaaagatcctcgatagccgtacgccctttggaggtctaggaataattgtactgcaagtttctctgaaaaggtctaattggctgaaggccaagaccaaccacaatgcacagctccatgtatgcatggcatgtatgtatggaggggtaaagcactcgctcaatcagacgatactgttggctcatgccgaggttggccaatggggctgtgtgtggtgtctgcattgccctcttttgggcaaccgccctgccagaccatgattatgcatttgcgcacagtcttgggtttacttcctaatatagttatggccagttttgtgctatttccaaatttggtaactaatcaactttcgagaaacttcctattttgtattccagggcgaccaagaaacaaacgtcgttccttctcactgcctatctattaaattatataccgccccctattattactatacgttacgaaacccacttcttccttcttcaacccctcaaccatggttcaacagatagagcttgcctgcgatcaacgcctacattatcgtatccttcgagataaaggctatacgtatccctctattatatcccgtttaaattgcagtatacagtaaactcaatatacgtattataatcaaaccatactgtagaagaagaagataggccgacttccaaagcttacccctgagtgccttaacgaagtaatcctatagatttagcaatctctgaagtatcgctatctaaattatcataatatctatggtattttagatcttagtatatctagggaaacacttcgcctatcttgtaacggataaaggtccgtacaagagggaaacacatgcaaacctgcacaggctcgggaaggaacatctatgtcatcacacatctgtttcgatatcgatccgtgaggggtccgtgtgagacccctaggtatggaatatctaagggaatgctgtatgtaatggaggatcgggaaacagagacagtagtatacgcagtggtatattggaactaatagctgcttctctagggaagcagtatgcgaggacaatatataggtttgtgggtcacatgattcatagaggctgtgtaagcaacacgcgttgctcctatccagtccacagtccccccacgcaccatgacaggtaccatacttcaggcatcagccttcttagtactggggccctgacactacaccgtattaaaacaattgaatacagtgattaataataaattactggcagaataacagtggagaacgacgtttgtttcttggtcgtacactgtgcctgcatgcatgagacttcgtctcatagtccccaacgtggctttcccccgcaccagccaattgtctcttcggcacgggaatccacagtaagatagcgaccgttacaaactcagctttagatccatcttattctgctatttccaggaggctcgaggcataaactaccacctgtcagttagcattgtaaatatctgaatcacggaggagtagctacatatttggaataaccaaaaacatactaactcaacggggtcggagaatatcttcctgtctttcttcccaggaatattttaaggtactctcttggttccgccataaccgttgcatttggtgcatatagatgtactaaccattcccacatcattgcattcagtgcaaggcatgttttcttttccgacgtgttgattcaaaagcagaggggaaagtggcgatattcttgtacggggaagggcaaaacaggggatgttgtagttatcgtagaaaagtcaaggttaaagaaagaaagaggatatttatagccctttagttccgatacccaaactcgttgggtggcaaaccccgacagtggccagagctcccaatgaccctcccaactaggcttgtacacatttcggctctccacatacccaacgcgatgccgaatcctcgttttgttgcagtcgatccaagccagagaaagaagcgaagggtgaaaacaccgcaatgccagacttgtttcaattcattcggaacataacaagaattccgcgaccatatcgcagactatcaggccagtaaagtcgtgactctccaatttatccgctgacttgccagtttagttggaattccagctctttgttcttcgcccttgtcattttcaatgtgatccaccccaagcaagattcttgttggaccggacgccaactggccgaaaatcagcaaagaggaaaagtaggccaccaaacaagcgaaggaggcgaagcaattggccaaggcaggtggcttgacatctcctacggtctagtttgacaccttattttcatcctcaagcgttggagtggatttttttatgaatatgacgatctatataaaaaacatacaataaatcgtccgtactacactgggtactcgtactgatcacctcctacatggttaaaatatttaaataagctgctgctcaggtgtaagaagttacttcataaccattcgcgaatgctttcgaggctaactggtttccccggttgtttactcccaaccccaagaatctcgggagatttgcgggatcggcgatcgtgcacggacataaggtggcaccaccaaggtagacacaccgtcggagagaagttggaggccccccactggtcctcatatcacttcgccatgtctctcgagctgtaccacactgcacacaacgccggccagaccaccgtcgtactaatccatggcgccttggtatctggtctctactgggatcttgtgatcccccacctcacgtcttatcgcctcctggtcccagatcttccaggccatggcaattccgccagcgcgccattttcagtggatctcgcagcgcgtcagattgcccagctgatccgtatacacgcgaatggttcagcgcacattgttggccacagtctgggtgctcaggtcgctatccgcctggcctgtaccgaaccagatgtggtgaactctgtcttcatctctggttttagaatgttccctcaaacatcacttacgccgtatattccatacgcagtgtgggtgatgctgcgtgtggagaactgccttagccggcctcttatcagctgggcaatggatggtgccgatatcccacgtattgataccaatctcggtacacttgacctatgtcgccagattgtatcaccggagcatcctacacaatggccatcaccatggcctgcgcgcactctgattgttgcagcggggaaaggggggttagtgcctacaaaggatagcccgggtgatgctgtgaagttgatggcgatcgggagagagctgaacgaagagactatcgcgtatacacatttgaaaatgcgacatccgtggaatcgtcaggatccgcggctatttgcagagactgccgcggcgtggtttgaacataaggagcttcccgagggctttgtcaagctttagcgtcgggtagatgactgtttgaaaatagaagtttgtcccaggacttggatcccataaactccatattaaggaacatcaagataaaatagaactttggatgacaattgtcgtgcctggggggtggtaccacctaagcagcggctgatttggtcaagcgggggcgtctgacaccctttcatgaatgcctaaacatcaacttcaggagttaaaggtgttgaaagattgattcaagggctcgaataatcttcgctgagcgccttttgggagtcaatttcccacgatgcgtgcagatattggccattacgccagagatgtcgtcaattctatcccatccttccacggccagagtgctgttggtgatttgcaactattattcggtaatgatatcttaactatagcgctgtcgagctttggaatagtcggcttctcagtctggtcgatacggagaccgtggcaacgtccgatcaagaaggtcgcgctccaaggacgtgtagtctttgcgaaatcggtatttccgtctatataggaaatcatagagcctaagtacatataaaat
